United States Patent Application Publication US 2026/0347870 A1, published November 5, 2026 (application 19/106,463).

The application's sequence listing, which the Patent Office published only in electronic form, follows.

SEQUENCE LISTING (122 sequences)

SEQ ID NO: 1 - DNA, 37009 bp, Beta vulgaris
  source 1..37009: mol_type = other DNA
tattccatcgaatgtagcaaattgactgtccgttgcaatttcggagtttccactcgtcgcatggtaaatggtaatgctatacgattctcacctctcaggagtctcaactcatcttcaactatcgcaggcatttcccaggaagaacccattaatggccaaagtgtctgagccgggtaaacccagtaagtcaaacattcgaatcacaactcaagcaaatttgtcttgtttgcgttatattttgctcatttcagccttttttgtttttccgacctttgcatactgaatattgtgtgtgtgtgtgtgtggggtttcagcttctgctaaaaggattgctgttgttggtgctggtgttaggtaaattttcgtctcttgcagagtttttgagtcatttgggaattctatgtgaaacttgtaactcccttcagtccaacgaacgcagtacaattttctatcaaatcatggtcctaatttccaattttccatatatattgttggaattatattgggattgtctatcactattaatagtattaggatcaattgtagagaagcacagaaatttttgggatcgaaagaatatctggattgccacattaacagcagatataattcttccaattggtttttggttcttcctaccttgacttgtctggtcaaacattataaactttaacctttaatatccattaaagtaaactataggatttttttgtctaaaacatgcttatataacatgaaatttgtgagaaaccaccttatatatatttttttgcgaaaacaaaccttaaacaaaattattatcgtgagaacaaaccttatgccaatttcgatcattgacccaaggttttggcattgaccgtgtcatgaattttgttgggtttaaaaagtcatgtgtcttgcatacgaaatggtaaatgcgggaaccttgggtcaatgtttggaatccgcataaggtttgttctcccaaaaaatgtttttgttcaaggtttgtttttgcaaaaaaacttatataaggtgctttctcagaaatttcatgttttataaagtagtatttgacaaaaaaccctaaaatatattatagaattattattgactaaattgtgtaaaaatgtactcttctaaaagtacattatagtattttagtggaacatttgcgagaaactactttataaatacgatttttgcgagaaatttcctaataaaaaaatgtgaagtgcaaaactatcttattgataattttctactccctcaaatccaaaatactatgaagtctttcctttctggtttgtcccagattagtttgtacgcttccatctttggtatgatcccacttttattatacttattagttttacgtgagttccttactctatctcttttaacaaaaatactcaactatctctatccaataaaaagttccttactagtcctatcacatctgctttttaataaaataacgtttgataaccacacaacttatatccttaaaatacacgttcaaccaagtgttgagattaatttggacggagggaataaatattttttgaggcatattggtagcagtattcggattccgataggttgactatgtttccaatgttgaccaacacttgccttgcatgtaattctaactttgctcttttttattcttcatttccctcgtattccatatacaatgtttagagacccattccttcctcttctcttctttcccttccttactatgctttgccataatcttcctcaaatgagtgcaaattaatttgtcgttgatgtaggccaactgattgtagcacatcttcatagttcatacctcaacacactcgtaattatattataccctacatgttaaatggctcatgaagctttattttatatcatacttcctccgtttcacaataagtgtaacacttttcttatttggaataatcacaataagtgaaaccaagctccaaatggtaagaaaagttcactcttattacaaatataccaccaaaaagtaagaggggatcacaacttcaatacttcttcactctactttattgtggtcccaactttctctctctaaattccttggtaactccccactttctctatgtttcacttatggtgaaatggaggaagtattttgtagtggtatttagctactaggccttggatgatatacaatcatacaatgtatttatattcacgataatttgctgcccaccttgattaccatgatttccaccaattttatcaatttcagtacttcaccaccccgaatttatattttttatttccaaccttggtatctccatttgtctgagtgcccgatccatttgtatcgcctccagaattgaagaagcttcctgcagctagacaattaggaaggttaaaaaagtttggagatggtggaggatagccataataatcattgttgggaggtggaacttggaaggttattgtagggttgaagtccttgatgaagaagaattgagttcaaatgagaggaaaaaggagcagggaagagggacaataagaaaaaaaagggtaaactaaaatcacgtgtaaggcatgtgcagatcaacatcagaaagcatagtcaacctactggtattagggcactgatacctttttgggtcaaaatttttttacaaggtatttcatgaggtagttttgtccatttttttttttacaaggtatcgtctcattttttttttatcatttagtttctcgcaataagtgtatttcatgaggtagttttttccaaaatttcctcatttattataaaatacctcatcttttccataaataatgcaatgtctagacttttacgctgtttacacatgctcctttgaccatctattgacacacaaggaaaaatagagtagagtcatgcaggatcttgttagatttttctcgatatatactttcaaaagatcaatttttttataattttttttttgaggggattttttttttataattatgtacttatcaaaggtcaaagttgtgcaccgggaagcataaaactctatgtgttgcaatttacatggaaggggaggagtataataagagaaaattatggtaaaaggttcattcctggagatcatgagaaaggaagtagaaagaacaaaaaagaacaatgggagtgcttttcaatgtttgttgtacgtagcatttattcatttgctataatgttttgtgacattgtagtggacttgctgccgcatataagctaaagtcccatggcttgagtgtgacattgtttgaagctgatactagagctggaggaaaactcaaaactgttgcaaaggatggtttgatttgggatgagggggcaaatactatggtaatgtttttgattattgcaggtcttgcactttagcgcacaattaatttctggatttttttttgtactgtggtggttatggtcatcaacatgtctcacccactgtgcttgcagatagagagtgaagcggaggtcacgagtttactcgatgatcttgggcttcgtgagaagcagcagtttgtaagtctttcattatctgaatggcacatactttatttcgaaagattgtaattgccttttctttctagatggcttcatcttcatgttgctttctgattcagtttcgtggctaactttccaagtttgtctgattgctaactctgtcatagccaattgcacaaaacaaaagatacattgcgagagacggtcgtcctgtgctggtaagtttgcttgttttacttttgacctcttttaagatctttcaactctggagcctggaaacatggtgatgcaggaggcaagttctctctattttacatcctttcttctctgtatcttatgacatttgcctcttattctgtgcagataccttcgagtcccattgcacttctcaagagcaatatcctttcagcgcaatctaaggtcgttttatgttaagacatacttgatgctgagagtttattgaattcttaaccttcttcttattttttttttatttttttagcaaaaggtaagtatattgcatttaccaaaaaacagtatgtacaccaccacagcagccatgtcagaatctagaaataccaccgaaaaaatcctacacccaaccagagacagttatattatatcctactcctaagtttctgtacccaatttacatcaatattggtccatttacaagatatttttataattcacagaagcacatcagttttaattagtttaataatgacctctggatgaataaccaactcagaccatatagccttattcctggctttccggaagttgtacgccagagcagcaagcacagcaatgcaaacctgtttcttatacctccttttatgtgtcttagcccatctcttatagctagtgaagatacagtcgtgtgcacaggattgaaccccaatccaactagcgaaagcctcacaacattatgactataaatacatctgaagtataaatgctgcacctttttctcctcttgcctgcacggtatcagaacaaatcccagctttagctaacaattccctggttttcagtttattcaatgccatcatgcaagcaatgaaagaatgttttggaacattcagtttgttccaaacacagtgagagcaagggacctttcctgcagttccacttagccacttatatccctgactaatagtatgactctttgcaccgtaaattgatttcaacttaactttttcataagcagtgaattgtgtgttgttagagtgtctagctgtctaggagattgggagaaaaggagggaccaaggagatagaaacacacctttgtgtttctttgtgtatttactttttagggtgggtcacgttttctgagaaatttgggaaaaggaagaaatagtaacacactttcccatttgtataacctgtatactggagctccaatataatttgcatttttttttgagctgcaagaatatgttgacaaacagttattgcttcttcctcagctacaacttatgttggagccattcctttggagaaaacgctatgcttctaagatttctgatgagcatgctcaggaaaggtaatgtcaagacatgtgttacctcgccttaattttcgttccaggaggtgagcatgcatttagaactaaaaggcacaaagactgttggtggtcttgcctgttcaaatataatggagaggagttttcgctacatttaccctctcttgaagtggggttgaaatatagcatcaagttgaatgcttgattaagtttaaaggacttgtgtaactctttttctgtttactgtgattacatgacctggttgattaacataatggtctgtttatctgtagtgtgggtgagttttttgagcgacattttgggaaagaggtaatggtttaccatagtatttctgctttagtggtaaattgtaatgttgctgataattatacttcgctgcagtttgttgattatctaattgatccttttgtcgcgggtacaagtggaggagatcctcagtctctttctgtaagtgaacattttgtgcttcactcccaattttttggaggctggaaatagattcttttccagttgttctgtcaaaaatagatgtagctttattttgaatttgaagttcccaattgttcattttgactattactgattattgctaagagtggcattatgctattatgctcctaaaagaaaggtgaattttgacctacatatagtataatgtatcaatattggtttaattgtttgttcttttgttccttttggtgctcatcttgcgccttgttctcatcgctcgttttttcatgttgcacttgatttaaatttgctcagcttaacttgtctttttgaatttatattacttattgctatattttactaatttcgttgaaactaattttttgctgaacttttcgttttgttgaaatcatttttctgaattaacttgattttcctgaatagaattgaattttggtgatcttaccttttctgcagccttttatttctttcttgtcctttttccaatctcatttttttatatttccattgtgttgacatcttatcattaactgtgcagatgcgtcatgcatttccagaagtatggaatattgagaacaagtatggaccataagacgtttattttaatcgacatgtatgtttcttagtttatacatatattaattctgtggtaaaaaaaccgaacaagaatatctttttttttttctatcatcaaaaagggtgaatatatgtagaggaaaaagatttgaatcaagatattagcctaaagcaataataatgttagtaatagctttaataacaaattcaaaacgtacattaatgaaccgagaggccggaaaatagttaaagtgaccactaagagaagcgaaggattcatgatgggttttcaacccagtagggcaaatttgttcaatgttctttacaaatcaagcttattaccttgtgggtgtttttgctagagatgaatgatagaattttccctagttggaagtcttttttggttactttatgggagctagtgatgtaatttgtttcgccttatggcatttcctaacatgtgcttttgtgatgtattgaagctttttttttgccttaatttatgctggattttaattttgttctttgtttcatttttcttgcttttgaaaaaaatatatagatatgtatatattaggattggtcgaggattttgagggaagggaaagacctaagaaaacttggatgagggtgattgatagtgatatgagtctatttgggatcgaagaaaatattcctttggataaggtgtagtggagggttgagggagcaaatttatgcagattagcttgacttaaagtttttctttttgattatttttcatttacttgtgttttgcaaacatttactcatgaatgatgtaaacttcttcaaccaaatctctggaaaaaaataatctacatggaaaaaacattattaatgttaacttgacagagatcccatccttgtgaagcagctagcaattaggcatctaacaattgacattttaatggacaggatagaatgtctcttgatagtcaataccctctgtttcattgtatcccatagctactaatctagtttgtatctttccaaagaaccattattttgaagtttcaccttgaacacccattttgaaccaatatgtttcttgcccttggggagaggggctaattgccatgttttgatgcggatgcaaagacacttgttctacctgagcctattgacttgatcatggatactctagggtttgaactcaagggaaagaatcaagtcttggcatgtgtggtgacatggcgtggggatggagtaaagaagagtcatagttctgttaggatatgttcttgcttgctacatagaatcgtagttctgttaggattgctatgatattatatctagtagatagattttatagttaattaggataaacatgtgatgatcatgttataataggcatgtgattagaggataggattagcttaattcttatcttgttgttagtttaattcttatcctagttttatgtttatcttagtcgaagttgtagccatataaagggcgttccattcattaataatacttagttttgctttgtgttttaaacatacttcttgattattgtttgcttgtgagctaactaatcaaaccattaaagacttttcaggagttttagtgctaaacatcttaatttcaggagtgattttaagagcgtttagtgatcttgaatcaagaaatatccttgttcttgttcgactaatatcagtggttttgttcgagttcttggagttaatctcttcaagattcttattcaacttgattgttgagcttattggtttagtaatcatatcaagtggtatcagttttccagggaggagaggatagataggattctctttgatcaacaaagatccaagggctatcaacaaggttcaaacattgctgcttgttcaagacttgatctttttctaccaagatgcattctttacgtcacaaggtagtaataacaagattaagagtggtttttacatccaagaatcaatctttcacgtccaagatttcatctttcacgtctaagattcattctttaagatcaagaaagttataacaagcatagaagaacacataaccatggagtccgagatggacaagcttgccaaagctatgcaagcacttgcaaagtcgcaaactgaatcacagagtcgactcaatgagaatactaccacaatcaatgggattggtagtaacatgaataggttggaggcacgcatggatgccattgcaaccatcatacaaaagaagcttgatcggaatagtgccaacttcataggtgccaattcagaggaagagttggcagaacgtgaagaaagatcatccaagactacatacaatgatgatcgtggcttaaagttggatgactataatggagatagcaatcgagaagacttgttacagtggattcgacaacttgagaaggtatgtgattatagaggctttgatgacaagaaaagattcaggattgcctccataagactcacgaaatatgctggaatttggcttgaaagcttcaaggcacaacgagccaagaaaggtaaagaaaagttgtgtagttggacaaagttgaaagttcaagcttaaagagaagttcttgcctagtgactatgaacaaaaatagttcataagactctctactataagccaagacacgcttagtgtacatgagtacaccatggaatttgacaagctagggcttatatttgacatagaggagaaagaacaatggaagattgcaagatacatcaaaggcttgaaccgccacattgccaagaaggtggaagtatccacttatcacacctttgaggatgtgacaaagttggctaagaagtttgaagaacatgagaaggaagagaagcctaagagttcttacacgcctaagtatgatactaatgctaaggccaaggctagcttcctactcaaagtggtatgaaggacctaagaggctaagaacctcaccccacctaaagaagacacaagagttgagaagcctaaagtcgtcgttccaaaggagaaatttgaagagatgagaaagtgcttcaagtgtcaaggaaggagacacatagcaagcaattgtcctaacaaaagagtcctcaccatgagacaatacctagctttgcaagaagaggaggatgtctattagttcgtccctgatgaagagcaaacttaggggaagaagaggaggaggatgcttttgctgaggatgatgcaaggctagtaggggtcaagaggcgcaccttacatgtcgaccatacacctagcatggagcaaatggaaaaatcttttccacactagatgcaaggtaggtgactatatatgtaatggtataatagatagtggttcttgcactaatgttattgtatctgaggtagtgtcaaagctaaacttagctacaagggcacaccctaagccatacaagttgagtttgctagatgatagcactggcatgagagtaaagaaacaagctttgatttcattctctataggggttataaggatgagttatggggtgatgtattgcctatgagtgcatgtcatctcttgcttggaagaccattgcagtttgataaaaaggtcatccatgagggggactctaatgtgtactctgtgttggttggttctaagagggtatgtttgcatcccttagctcctcattcagtggcgccaaagcaaccacctaagacaccaagttactttctatcttcaagggagttcgaacaagaggtggaggaagaaggttgtgcttatgccttgattgtaagacatgctgccacaagtgtcaagactactagcaatgagaagctcgaagccttgatgaaagagtttgaggatgtctttctagaggaactacgacccttgagaggcatagaacatgctgtagaccttgtacctggcgcccctttgcctaacaagcctgcttataagtgtgatccagtggcatctagggaattgcaacgccaaattgaggacctaattgaaaagggctatttaagggagatcatgagtccatgtgttgtgccagctttactagttcctaagaaagatgacacatggaggatgtgcatagatagtagagcagtgaacaacattacagtcaagtaaaggtttcctatgcctagattggaagatatgttggataagttacatggggcatcaatcttttctaagattgatcttcgaagtggctaccaccaaatgaggatcagagaaggtgatgagtggaaaacaacattcaagaccaagcagggattgtatgagtggatggtgatgccatttgccttatgcaatgcgccaagctctttcatgagcttgatgaatgaggtacttcgtccgttccttaacaagtttgtggttgtttacatagatgatatacatatctatagccaaaatgtggaggaacacttgttgaacttgcgtagcttattcatgaagcttagagagcaccaactctatggtaagattgatggcgacgaggttgacgggggattatggcggcagtgaatcaccctctttgccggtcactgaaatacaacctgaggtatctttaaattctgtaattggattgactaacccaaaaactatgaaattgctgggaaaaattgctggatgtgaagttgtggtgatgattgaccctggggcaacccataattttttatcactagctactgttgagaaattagctattcctgtgtcggaatcggaaggatttggggtttctctaggggatggacaggcggtgaggggtagtggaatttgtagaggggtgttattgagtttaaatggtggagttgaagtggaaacagattttcagcctctgggtcttggtaattcggacgtgattttgggtgtacagtggctggagacgttggggacagtggagagcaattggaaaacacaaacaatggggtttgaaatcgagggtgtcaagttcactttgaaggtgacccatcactggcgaggtctcgaatctcactcaaagccatgatacgtaccttatgtaaagagggtggaggtttgtggcttgagttgaaccagattgagcattatcaggagaaaacaccgcattcatcagccttacctgaaattccagttttcttacagagagtccttacccaatttcagtctgtgtttgctacaccagaaggcttaccaccgataagagaacatgaacatgcaatagttcttagagaagggtgtaatccggtaggggtaataccgtaccgttatccacagttccaaaaagatgagatagagcgcctcatcaaagaaatgttggcttccggaatcatcaatccttccacgagccctttctcgagcccggtgatattagtgaagaagaaagatgggtcgtggcggttttgtgtagactatcgggccctcaataaagaaacggtccccgataagtatcccattcccgtgattgatgaattgttggatgagcttcatggggcaacacttttttcaaaactcgacttaagggccgggtatcaccagatccgggttaaggccgaagacactctcaaaacagcttttcgcactcatgaggggcattacgagtttttagtaatgccatttgggttgacaaacgcgccggcaacgtttcaatcccttatgaacgaggtcttcaaaccattcttgcgcaagtttgtcttggtatttttcgacgatatattggtctacagtagttctgccaggaacatgaggagcatttgaccttggtgttgcacaccctagcagctcataaattgtttgtgaatcagaagaaatgtgattttggcaggtcggaagtagcatatatggggcatatcatctctggtcaaggggtggctgtggatatggagaaggttcaagcgatggtggaatggccccttcctaaaaacctccgggaattacggggatttttgggccttacagggtactaccgcaaattcgtacttcactatgctcatatagccaagcctttaactgatcaactcaagagagatgcgtttgggtggtctgaggcagcaactcaagcctttgaaaagctcaagaaggcgatgatcacatcccctgttttggcaatgccggacttccaagagttgtttgtggttgagaccgacgcatccgggtatggtctgggggcagtgttaatgcaaaacaaccgacccattgccttttacagtaagttgttaggtgcccgggctcaattaaagtcgatctacgaaatggagttgatggccatctgcatggcagttcagaattggagatattatctgctgggtcgacatttcctcattcgtacagaccaacagagtttacgtcatctcactcagcagcgagaagtaagtactgccttccaacgttggatgagtaaacttatggggttcgattttgaaatacagtttaagccggggtgtgccaaccgggtagctgatgcattatcccgcaagacagtgggagaggttgaattgggtgcgctgatattaactcatggggtggactggaccgacttggagcgtgaaattgaaggcgatcctctgttgtgcaaaattaaacaagacttccacgggggtgctattactcctgtgcacttttctttggtggacaacaagctgttgttcaagggtcgatacgtgattcccagctcttcggtttttattcctaccttgctgcgagaatatcacgattctcccattggagggcattcgggggacctcaaaacatatctcaggatggctgccgactggtattggaggggcatgcgcaaggatgtggcgcggtatgtgcaacattgtagcgtgtgtcaacaacaaaaaatgtctcaacagatgccagggggggtactacaaccactccccataccttcctcggtttgggatgacttgtcaatggacttcgtggaaggcttgccatcttccaagggggtaaacaccatcctcgtggtggtcgatcgtttgtctaagtacgcccacttcctcccactacgtcatccatttactgctgtgtcggtggcaaatgtgtttgtcaaagaggtggttcgtttgcatgggtttccttcctccattgtttcagatcgggatcgaatttttatgagtgtgttttggcgggaattatttcgtttacatgacaccacactcaaacgaagtaccgcgtatcatcctcaaacggatggtcagtccgaaatcgtcaatcgagctctggagacttatttgcgttgctttgtgggggaatacccgcgctcttgggctcagtggcttgggccgaattttcatataatacttctcctcatctctctaccaaaatgaccccgtcaaggtcctttatggtagagaccctcctactgtgatacgggttaatcggggagcctcacctgttgaaagcttggaaaacatgctccaagagcgagacgcagtattagatgccttgcagattaatctgattaaagctcaacagaaaatgaagagtagtgctgatgctacaagaagagaggtgcattttaaggtgggagatcgagtgtacttaaaattacagccttaccgtcagaaatctttggcttaacgcccttatgagaagttagccgcccgtttctacggaccatttactattttacagaagattgggcaagctgcatacaagttacaacttcctgtttctagcaaggtgcatccggtgtttcatgtctcccaactgaaacaggccgttggttccattcccgtttcagccactattccagagcaattgtcttctgacttggagttagaggtggaacctgatgaactcctcgatgttcgtagtgtttctagaggccagcacacttacttggaagctctcattcagtggcagggattaccatcattcgaagctacctgggaagatgtggctgctttccatcaccattttccatccttccaccttgaggacaaggtgaaactttgggggggtggtaatgtgatgcaccaaactaccactccactactcacctattagaggcgtaagaaaaagggggtaaatcaggaatagtttacaaattctgttgaaaggaatattttgtaattatgatgtcagaggttgttagcaaaaaggcagtagagtaacaataaaaaggggaagggaggagagaagaaggtattgagatttttgtaaggaacttggcccttgggagagttgggagcctctcgaaagctcaccattatcttgtgaatattttccttcctggttatatacaagaaccttcctctgtcaatttcttttctctctaatcttatttcttattctgttttctggttgccattgtttgaagttgcttgttgtgcttgagtaaatacgtgaagtggtgaaacccatctgaattcatcacatctattccaagtggtataatacaagcttgtaatccaaatctaatgagaaatctaagttatgaagaatttcaaaagaactaagtacccttgttttggatgcccaaggatttacttgccgctcaagttaatgctcaacgtgcaagatacaacctctttagtatcccaaggtagtttccataagaattaattgagctcaaatcaagaacaatatttttatgtattaatgtgaacacttcctgaattatattagatatatggtctgaaggttggaagaaagattagcttttaattttaagtttgagatagtttttagaatcgaggaaagattagctcttaacttgtaaactaaggattgctttataagtaaaacattagttatggaactcttaaaattggttttgaacatttctagttaaaaatcccatgtaattctcccaaactagcttaaaatctcacatttcacaagctaaggagagacaaatggcgttctcttgtgaaacaatctaaaattttcattaggctactgttttcaagtatttatatgttagaagtgccgcatataggtacataaaataagtttacaaacacaagtaggaataaggaaaactaaaagagaaacttcagccatacaaaaccggctgaaatcagctactactttctactttctagcttcaaaatctgattgcaagtctcctttaagccaatcaccaatgaaaacctttcctccacatgaagtgtgctcaaatcaagagaagaaacccatcattcgcctatagctacctgggtcagatgaagatacggcaaaaaaaacgctggaaatcagtgaaccaaaataagcaccaattggatgctttctgtccttgctacattttcttctcataggactacttcaagccatacatgaataagcagttagatccagctcctagcatccatttgatcgtacaaatgagctccaaaaagataagtaaaaccaagcagccaaaacctaattaatactaatgatgaattagttgaatagctaatgacgatgaagcaacactttagtaggaatagtgttaattatgatcaatgctacttaatcttctgattaatttttggaaaaatgtcatatctaccttctgtatacacttattcataactatatcgtattattattatttttaaataactaccttttaagtaccaaaacctaagaaatcaggcacttgatggattccatccaaagatccatttggcggggcccactaactgacttttgattttttgcctttcctcttttggttaatctcaatggttcatcaataacaactcaatcttctccccatttcatcaaatcatccctaaatcagaactttttcaaattcacccaaatgaggttatggaaacctctaccaagtttattcgaccacttttagtctagctcaaagttttacacttgcttcaaaaactaagatttattaactttagaaattaggtttttatttttattttttatttaactttgtaacaatcttaaataactcaggtgctttctagagtttggctttaattgtttttcccttggttatgtgaaagaagtatgactactttctccaagactaaagtagagagcaaaaaatgcaattctggaatttcttgcaaaagaaaaggaacgagttaatgataatgaaaaacaaagaaaatgatgagaagagaggagctgaatcaatcatgatcatgtattttaaagttttttttgctattgaagtgacttaagaagaggaaagaggatgagtgaagacaaacaaaagaaaggataaatagagggaaatcttgggcttagaaaggtgaaaaggtaagaagatgagttagtgggccccaacaaatgtatctttggatataatccgtcatgccactgtttggggcttgcttaagtccatacattacttcactaattttacaaaatttattttcttgaccaagaactgaaaaaaccttcagtggtgatctattaggttttggaagttaaaaggtagttatttaaatgtttttaatataaaaggtagttatttagatatttttaatataaaaggtagttatgtgaataaaagtgtatataaaatgtaattttttgacatttttgccttagtttttcttgctaattcaccttttcaacttgaccaagttgctatgaggagaaaacgagcaattattaagcaaatcgcaacactagcattaatccatggcccatgaaactctccataattagagattggattagcacttagtagaacttcttgctcctgctccaggtttccattacttctttatctaagtgcatcaaaaggttgttgggttatgaaaggtggtggttgtgtatagtcattgtcaaaatgttgttaatgcactctatttagaggatgagggattgaatagttttcacctcgtgacctttcattcctttttaaaaaaattgataatgtgtattggtcctatgactgtatgaatggtaataagctatctcatgagctgttactatcttcctcagagtctaggtagaagggtttgggctgataattttctactatgtgcaattagtttgttggatttggatatgctagttgatataggtcctttcccttgggccttctcttaatataggcctacagtgtgattgaagataaatcttctggagaatataagaacaatgagatggattggttagaggttgatttgttcttttggtgtaagactatttcgggttctctattggttatgttcagacgccagaatatgtgttggtgattgttttccatgaacatactttatccgcagagacatttttcttttttcttcctataagattatatttgtttcctctcttggtgctcatctcagtgtctctactttacgttaaactgttgacattacttgacaatgcgtatatttgtcgcatggtgctcttccctcactccacgtcgaccccatacatcaaaaaatgccattaaagaatattcgaactcacaaccttgtgttgaaagaatggaatccctaccaatgactcattaattcattttctctttaagaaataaatgatttcctcacaaacttttaggctttaagagcccaaaagataaaaacataaaataagatagacatcaacgtcaagattagccttaaatgcacaaagcacatgtcaaatgattgataactactcacgagttgcaactctttgggcgttgcctaatattaattggatctcttttaaaaattgttggtggttatggttggtggagaggaccatgtaacttttagctggtcacaactggtaatgattgtcacttttactgcccataaaaaaatttaaactgttgaatatgtttctggcagtggatctgacaaatcctttacaagttggcgtccattttgttttgccatgtgactcaattataatacgtgagttttattatccaccaggtttggctcactaatttccggattaattcaatctaaactgtctccaaagaaggaaaagggtggaggaggaaagccttcttctaatgaaaagacacgcatacgtggttcgttttctttccagggtggaatgcaggtattagcatgtagctttcattctgttaacatttgtggttcttccagacatacatccaatgctttttttttttcttgctataaccataaacattcttgtcatgaacattctttaatactgttgctgagcttagtgtattcgttcattcatgtaatttcctctcttgaggttaaaatggcatacagccttacaacctatatccataatgctccttagagtagaatccctaggttataacatagtaccacttatcaaaataaacatggcacacactgcaggacaagaagtaaatccacctagagaactgagcacctagtagtaaaagcagcgatacattactaataacagtagcagggccataagagtagtaaatgggcctcatttcaacactccccccgtaatggtgagagagaagaagcagtctgaactcccagcttggagagcaaaatagagtgttgctgaacagggagaaccttagtgaaaacatctggcacttgatcttgagatggaacataggtaggctgaataaccccttcttcatttgtattgtccctcaggaaatgacaatctatgtctacatgcttggttttctcatgatgaactagatatgctgctatggcaagagcagcttggttatcacagtagataggagtagcactggactttttaatgcgaagatctttgaggagttgtttgatccacatcacctcacacacagcaagagccatggatctgtactctgcactgaccacaagaaattgcctctttgactttcaagatacggggggagtcaccaaggagcacacaaaaccagatgtagaatttacaacacccatcccattcactatcacaaaatgctgttagttgagcactagacttgttcgccatgagaattcaccctgttggcagcttgaagatgcacattagtggggcagtgcataaatttgcttaaatcatgtatagtgaaggcaatatcaggcattgccttgtaatagtgagataaatgagcttccccatcaatttttgatacacatcaggttgttgaagaggatcaccattgtcagcatagagcttgacatgtgagtccatacgaagcctcaatcgtctgcaatttataaaaccatattcatcaacaagacccatcacatacttctttagagataaaaacgatacttcactacactgatccacttcaatcctcaaaaaatatcttaggccacccatatctttcatgtgaaattggccagcgaagaaactctttgcttcctcaatagttgctaaactattgccagcaagaatgaggtcgtccacatacaccaatatagcactgaaacagtgagagttttgcttgaagaatagagagtagtcacacttggattaagtgaatacattttgctttaaagcagtgttagcttggcaaaccattgcctcaaagcctacttcaagccataaagtgacttaagcagcttgcacaccttagttcatttggtgtcacttctgccatcagtacttagctccccctctccttgaactttgatcctgttacatgtttcactatatcctggtgatagcttcatgtatacactatcctacaattcaccatgcaaaaaagcatttttaacatccatttgtttgcaagaaccaaccctctaaggatgcaacaacaagcatgtggtcatctttgctacaggggtaaaagtctgctcataatctattccatatctctgtctgtcacccatgattacaagccttggcttatgcctattatttgtgccatcagtgctgtattttgttctgatccatccatgtgagggatggctcatttctacaaaatcctagttccgttaggatttgtgttgttttcctaattctagtaggaataggactcctaaaatcctaatcctcctagttctgttaggagtttaaaagttttagtttgattgtaattctagttgtgttagaaatccaaatcctagattcatgtcacgtatggttagaacatggctagtaggataatttgtcttgtgatgtccatagccttggcatttgtggcacctaactttcaatagcttgtcttctgtctccttttctttctccttctttgaggaatcaacgtttttagagctatctaaaccactagcatcaatattaggtttaaaagtgctaaaagatttcgaatagttcttacttgcatacaatttctttttctagtttatgtagcgtcaccagggaacaaaaactcggccgttccgttctggaacggccgctttgtaacggatttcagagaggccgttccgttaaataccgttctagaacggtgatttggaattcacaccaaactcggcgcgatagcgttacgtaacggtgtaacggcgttccagaaccgttacaatcacataacgtccgttatttgaagaagaccagttcttttggtggaggaagaagaagagccaacgcaagatctatagatctgagttaaaatttgaaaataaaacatgtttttttatttaaattaaagcttacagaggatgtagaactcaaattcgagtaaacccctcctttaatttcattaggttactgcaaatcgaaccctaaattgcaaaccctaatttcgaaaaaaccctaatatgcattgggatgcaacgctgcttctccggtcatggcagagaaggtcgacgagtcatcttcggctgcttttagcactgtagctgccggtggttggcttgtttgcaggttagtgcttgctggttttctttctctcataccgatcatcttcttcttttctctcttctctttttcttttttattgtgtgactgccagtcacgtgataattgcaactcataaagtatctctttctctctcttcttttcatccctttttatttttctttcccttttagtttttattccctcacgtggaatcacctaattttcatccttttttatttttttagttacactcttacacagaagtatgttcaaatatcattatagtacctcaaatattgtatttataagagttttggacataatatgatatagaaagtaaaatagaagaaaaataaagtttaaatgtcacttgtgtgatttttttaaaaaaattcacgccgcgacggccgcgaaacgttctatttcccgttacaagccgttcccgcgataacgcgaccgttcccgcgaacgcgaccgcgaccgcgttttttttccttgagcgtcacatcttgcaagcttcttcaaaggtgagttatgtgtacaactccaatttctctccaatcccctccgtcctcatttaggcctccaaggaagctacttaaacattgatcttcaagttcatcaattttccaaagaatggataacttctcgaactcctttatgtaatcttcaacggacatattcccttgtttaagagtagaccattccatgtacaagctttgtttgtagttagaaggaacaaaacgtcctcttaacaactttttaagcttatcccaagtagagattttgggtttattagctttcacacgctgcctctttactccatccaaccaaatagatgcatatttggttaccttaagcacggccaccttgtatttcttttcttttggtgtctcttaatcccaagtagagcttttgcgtgtgaaagctaataaacacaaaatctctacttgggataatcttcttcttgtttccgaaacaactaattcttatggtagttaggaaagcaagaatggtttctaattcaatagggaatatattaattattattagtttaagttaaatagtgcacgaatctaaatagattattcgtctcaaaatctcacttaagtatagatttgtttggacatctgagggaagaagaagagagcgagataaaggagaattatcactcaatgaatccatatcccgagttttcccatttacttctttgaaagcaatatagttcacgaggtcttattatcagtctatggacataagagtaataatttaagggcaaaaactatgactttatgggtttaaactgatacatgttctgttaaactgatagatgttctgtgttaaaccgatactcatatattcctggttaaactgatagatatatgatttaaattgatacccgtctcagtcatgtcttggattgagacggtctgacacaagactttttgtgtattatatatctgattagaataaatttatcctgtttactaattattttatcttctccagacacttgttgacacaatatgcaatcagtttggtaaagatgaactcaaactacagtgcaaggtcctttcattgtcctacagtcataaggggatcccttcttcagaaaattgggtcgtgtcttctgtgtcaaaaaattccattgaagatcaacaatatgatgctgtcatcgttaccgtgagttttactttgcttactgctattgcaccaatctttcttcttttgacacactgataatggcaatgctgttgtggtttgaagccatgttatggggttttagggatatttatggagtctgatctaatatgttattggataaaattcagatctgtaacgtgactcaatgagattgaaaaaaattgaatcaagataatggattggaaaattaggagctaacctagggtctataagcgatccacttggagtctcataccaagcaggtattcgacattttaggtttatattgctgctatggctcatatgggagcctacatagggtctggtgcttattcctttttcttttgtctagttttggggctgcacatttctgttgtgttttgatatggatagccatcacctgcaattgcatggaggctgaactaagttctataggggagcaaacagtatctgttggaaatttattttcatattgtgtttttaaatgctataatccaaaatttgttgttcccctaaaatgcctaaaatacccttatgtaactgctccatctgtcccttaatagacttcccatttctccaatgcatgtttgccaatacacattttgtattgttaatatcaaaaattacatattagtaaaaattataaaagtttgattttcctaatgtacgcaatgagacgaatcaaacaagacgccatatgactatgttttttcttatacttcctatgttttttaataagtgacatgttttccttttagggaaatgtcacaataagtgacacatagctcaaagtagtaaaaatacttctcatttattacatctttgccattatttaattgtttcacctacctactttatccaatactcaaatttgattggttgaacaattggtcccaactttctctagactccttggtattccctttcccccactttctctctgtgtcacttattaaaaaatggaggacgtatattggaaaaaaattggaaggttttcttcacttatgaatagtggtaaaattagagatgggaaggctattttgggatggatggagtaatatttaaatttttaaaataatgtcattgttttagtgatgaaataaaattcaaggctattttttctagtaattatgttatctgtacatcaccacacgtatcgcgtgcatataagactagtttgatgatattccaacactgttcgaaggaagtcaggcatggaaccatgtttgcttccatatgggaaatattttgcttactctccttcaaacatctacctcattatcccagaatgattgatcgaatctaatacaaatatacaattgatcatatgccaccagggaattacatcaaattaaatttttatagaaggggaatcagtcatagcctcatagggaacgaataagtgatactcgccagtttctttcctggttacttttcctcttctcactagccatcctttatgtatgggtatgctgcatcattcctgccactggttgggactcccgtttgaactatggggggatgggaaagctaagccatcatcttcaaattgagtttcttgagaatgtaagacaccatctgtaagatgaatatagtgcactctatagtcaatgtcatgatctttatgggtttatctgctgaaataactgtgatatacccagctctccatttacaaagttttcctacatattaaactcttgcccgcaattctagaacttcattgtagaacttttcctacataagcatcatttgtcttttctgtagtaaaagttagaaagagctttattttagaacattcgtttttagttttctttgttgttgattactccgccacttttaatacttttatgattcaagtatttgacaaaatcatgtaatttaggtcctctgctgcatgcagtctataccctctctctctctctctctctctctctctctgtggttgtgtcttacttgttgagttactaactccagccattacataaagtaggctggcattatgatgagcaaattactcaagaccacatgttagctcctttttcttttctccttattctgaaaggcaaatataggtccatcttggtgcttctcatgtcataagtaagctgaccccctccttttccagggaataggacaataatccaaaagtgagggttttacatgttgggatttgtgaagtttcttattttacttaatagccgagtcagtgttacaatacatagtaccgtgttacaaaatagtatgtaacaccaagcatgtttatgtgcaaaattgtgcaagactttgttgctggcacgccaagggctgttttaatgtagtttacttattcttttaggtttttcagatgacaatcataaagggaattaggagtgtttttattgtagtcaatccctattgtgctacaacgataaaagaaaaaagcacaagactagaaggagaagtaatgtctaggaaagactcctcacctggggttgctagtcacctacacatcttagaaggcatcaaaccaaagcttattcccctcgactgttttcgggagaaaagaagacaaaattgtttctaacttatactttaccagtttcactacagcatcagaaagaagcaaaatatgctcccacaacacggcgaacctagctttccagatgtgataaaccagaccagcaaaatgattattttcactagagctttgagtctattttttcggtttttccccttcttcctggtaatgtcacgccaccaagccatcatctcaattttttgagatttgacgtaatcgctcaaatagctgagtaagacacttcttgctctaaatactaataaaaaagaggtgaatgtgggtctcagccatgttactcaaatcggataaagtgtctactcttattagggtttttgggtgttggactcatccatttttttttgtaaaatgtcaagattttggtttgaaatgagagattcaagtgtcgtgacatgagtcggcacgcaacacttaaacgtgtcgaagtaacagagggtctcagacaatcaactttaatcaatcacgaaccccaaaatttatgcaacctttgctcatattcagtctctgtaaagcactcaactgcagcacacccacccattcgcttcacctacagcaggagggcacccaagtaattgctatgatgagcgaattattctgttttgccttgctggaatattgctgttagatttgctgactcactggcagttaattatagtcagagaatgagaaatatcctgtagagagagaaagggtatcttttgtatttagctctataaatagctaaggaagggaagggcattgagagtttatgatattataataggagagatttagcctctcgaatgctgataggagcgtagctcttgttggattatcaatactactctgtttgctctatctatttctactcaggttccttcttgtacagtggatccctgattggatttacttcatcaaccagcagataaaattatttgtaggcacattgaaaccattccaaacctaatgaggccaaagtttatcacaaagaatataggagccaaatgtaggcaacagataagagtataattgccagaagttgaagactccaggtattgttcagaaaccttaatgcatatcatcattctgacactagattttccccggagccaactaacaaaaatgaattaaagagattaaggctatgtttagttcacctgaaattttctgatctgaacttatctgatctgatctgaacttattttttctgatctgatctgatctgatctgaaccaatctgattacaagatcttatcttttagatttttctcaatatataagaaaaaatatagtcatgtggggtcttgtttgattcgtctcaatgagtactttattaatattcaattattataatttttactaatatgtaatgaaagatataatgatttttaaatataagcatgatctgaactgatctgatgtgaacttattttttctgatctgatctgatctgattagatctgaaataagcaaaaataaggtgaactgaacatagcctaagcaacaattgagggaaaataagatcattatggctaagataagataaatatgtaatgataaaatcagagtaattatatcagttacactctcaacattcgtcagattgaggtttcctcccaaaatgccaacccacttttctgtattttcacgtccttctctctacccttctaggtatatattacatcagctgtaaaatttttgaaccaactagtagaatactgatctaccctcaactgcctcactttctcattttttctgggcctttttctctctagcacaagtccacataagtgatgcatagcagaaatataattccactagtcatcctcaatattgatataacaaacacatcacccacatattatcatttttaatcgctgcatgcgaggcatacttacccaccaatcaggatatgcataacagcgttcctaattccaaaaccaccatatatcttgggtttgcaactctcatccctagcaacaaggggactttctgaaaaagtggcagattccgcccacaagtagtttgtacggacacctttattatattattaatatcatatttcggcaacacaaattaccagcccagtaaaacatgaattgacatgagactaacaaggggcccaatctaatatcgtacgtctgtactaagcaatgtataaaaaaaagctcaaggtgcattgatgcaatagggatcctaatgtgcataggtgcgcctcattgaagtgaggcaccactaaggataaataaaaaagattgatgtaaaattaaattgtgcaccttgggtgcgcctcgatgaactttttttgtgtgcctaagtgtacctcaagtacgcctcattgatatcgcctcgcctggcagaaaacgagcttgaccccaatcgccttgctccccaccgcctaggcgtgcctcagtcacactttttaaatacattggtattaagtactcagaatggcaaaaagaaactttgggcattaattagacatttcactttttgtgcaactatttgtgacttcagagattgatatgttttctacattacagacttttgtgatggctgcatggtctccactgtcaaagaacattagtttaagtagaagaaatattgctctattaccttcctccctctacaaacaaaatcctaaaatgtggttatgtagtgccaattcaaacttgtagatgcatgactaatgctttcattatgctgtgggtttttatactatgattcatgtccaattacataacaattagctggagtcaggatatgtcacggaaattttaagcctggcaggatgattgtttatattttctctttttcggtgtttaagtcaaagtaaacttctaggctgctcttttataggctagttgggctgttggggagatctacacattaagtgtgaagaaatcttgtctaactccagtttggttgagaactgtaagctgtcataacatttgttgcatgatgaggccttgtgggattatcatgttagctgtaaactctaaacttacttgaaatctagtgttgtgtctccttatttctgtagtcaaaattgaaccttctgtacgtttttgatacctgcgactagaatgatggaattctgaattactgatactattacaaccatctgctaagaacgaagatgactcttagctaatttctcagcagatttagagaaattaagaagaattactaatgaatatttaaagagaaaactaccaagatatgattgtattgatgaaaaacaccaattacaacctaaccaacattcgagaggttggagctctcccaagtaaccatttctctcactaaacttatcaattttcaagatgccttttccattctcagttcctctatatttatactactccccttagcaaactacccaacttattccccaagtaaactaaagagataatatctaaaatacccttccccctacaataatattagttcttagcattaccggccccctaaacttccaccttgtcctcaaggtgggtcgtaatcatcactaaattctgggcctctactcgtatattcagtgtcttgcagcccttcaggccccaagcctaggttatgcagctcgtgttgcggctcctcctcatatagttctctggctggagtgagtgcctcaactataatgaaaaagtcctggaggtggggaaggaaggagtgtctgaaatggtgtggtgtgctgctggtgttatgggcttgtgcctgaaagttttgggtttaaagagatggagtggagaagagtggagaagtgactggagacgtaaaagaaggaatcataatttttgtaagtggtgggttgaaaaagttggtgggaagaattgtttttataaaatgtagtgtaatggtcgaaaaatgggtggagtaagtatggtttttggctggggatgtggtactgggttgaaaataaataggtctgagcttacttgtaaaattggcctcaacatgagcaggcccaatatcttgagccaattccccaaaagctggcaatagagcactcttaattgcattgttgtgggccatcgggctccaaacatatattcggaggagccggacttctttggtgatgtcattagcttggcccattgcacactttcccttaacagcctcaagatcttttcccacttttgtaccccaaccacgtggcttcaccatcctttctttcttgcttttgtcacttttttggcaatatacgagtttgtccttactaccctcatcttctaatgttggcttcctcaccaagcttaatttctggaattttgtccaccaaatcccaccacccatcgtcaacaccatacctatctacaccggccaagaagcctggtcctccacccgaattttcgccacagacaaagcctgaacaaccgtcagttctctcaccggagaagttcacaggtccaccacctgacccactagttgctgatccacccttcacaaatctccctcctctggctgccacaagtagtggttcctccgtaatactcatatttctcgtccaagagccctggaccaccaccggacccacttccaccggcaccaacttgttcaaatgatacttctctttcttttccaaacagcctacttggactggaaaaaccactgcgattgtagcctccgccagatctgtagcctagtgcacctaacgtgcttccaactgcaacccaatagggatggaaatggatgggattcggggagggtggagcatcacccgcatccgtcacccgcatccattcgctccacccgctccacccgcatccatccatccgtcacccacgggtgaaacgggtgggtcggtgataaacgggtggaaccatttagggggtgtttggtatcatgtttttttacaaaagaaacagaatcaagtaacaaaatccgtttctacttgtttggttctatgttgctcagactcgagtacccatgtccgacacgggtacgtgtccaagtgtccaactcagctattttctagaattttttatattttttaacccaaaacaaagtgtccaagtgtcccacccatgtccgactcccgaggatccgacacgggtacttgaggtgaaatgaagagtccgagcaacggaggtttggttagtgtgtaaagtaacaattaccgttacttgaggaaaacacatccccccaagttgtttccattcaaaaacctaaggaaacaaataacgtttcactcctcaaacaagaggaaagggaatgggttatatttatttccattccattaggataccaaacaactaataagggtaacacttattattatcctttcccctccttatcaaaatcctttccattccgtttacggtattcataccaaacacccccttagtatattttctaatgaaatttgtgatatgatatgcatgatataaaataattctatcaaaaatataaaaagtaagtaaacttacatgtacaacttaatagatgggtgatgggttggaggttaaacgagtgatggatcgggtgacgggtgaagaaattctcacccaccactcgctttccatccatttaaattaggtttttcatccatttaaaaaaccgggttaaacaggtgatgtatgatccatcacccatttccatcctcaaacacatcccgatttgtttactgcaccaccagatccaccagtataaccacccgaaaaatcatcatgccttctactagccttgtaacctgctcccggtgagaagcttcttccacaagtggtggtcgctggacctccatctccttcttccccaaaaaattttccatgacacccactcgacccttcatctgtgacaacctcttcttcgtccacctctgaagttttggggtcgtcttcctcctcaagctcctcttgaagtaactttaacttccgttggatgggagagaacgcttcattgattatcttcaccagatcttcttgaagtttctcgaaactttttctcacgttttcctctacctctttcgtgatttcctttccgatctccttcatttttagactaggagctcttgcgattccatggcagatttctttttttaaaacaagaaaatcaggcacttaatctcccagaatagtggtgctctgataccattttctaagaaccaagatgactcttagctaatttctcagcataacaacaaatttagagaaattaagaagaattactaatgaatatttaaagagaaaactactaagatatgattgtattgatgaaaaacaccgattacaacctaaccaagaggttggagctctcccaagtaaccatttctctcactaaacttatcaattttcaagatgccgtttactactccccttagcaaactacccaacttattccccaataaactaaagagataatatctaaaatacccttccccctacaatattagttcttagcaccatcaaactgggatggatggttttgtaaggttccaatttacttctccatcaaaatattttaggattttttatctcatgtattttagagtttcctcgtccctttttatctgataagattcttctgatgatttgattttatggtaggctccaatcagcaatattaaagaactgaagattctgaaagctggagttccattttcacttgacttcattccagaggtttgtatttttatagtggttagacatgcttcccctagttttcaaagtaaaagcatccttgttgtgacgatattttttcccttgtttttgtttttattattatcatcacttatttccattttctattttccatgctgataagatgttcatcaccataatcttgtggtatcagaagtgtttagtggagtttattcactacacatgcagttgttcttttgccatgaccgccattcattttctcgtcaaaacaaatctatgaagtttggttttcagactcatggttcttgtagctcttgtgaatttttttttcttctccttgcatgcattcttcaaattacatattgcatataccaggtgctctcctttattttatatttaatttttaaaattctatcatatattttttaatgtcaaacctcaaactaggggttcactgcatcttaggcttaccaggctaatatttctttacttaaccttttccctttatatttgctatcctcttgtgtagtaatcaccataagaagggtacaaactaaattaccctcccattcttttgtatcattctgaaatagtgtcacagagctttgatttttttgccctcatttaatctggcaaatgttctctctatttttttttttttactttcttttgacgggattctcaggcaattgttacggggagcagccagtcacactgtttctgtttattatgcaggtgagttacctgcccctctctgttatgattactgcgtttaagaagaccagcgttacaagacctcttgagggcttcggagttcttatcccttcgaatgagcaacataatggactgaagactctcggtaattgtctggttcacgtgtgtagcgaatcagattttcaaaccctgatttcgtaacattgcaggtactctgttttcatctatgatgtttccagatcgtgctttctccgatatgtatctctatactacctttgttggaggaagcagaaatagagaacttgcaaaagcttcaacgtatgagatatgcaatgttttaaatgtatgctatagtcatcgtttcaaccttttggtgcctttttcttactaatttatcctcctggtttaatgatcttagggatgaattggagcaaatagtttcgtctgatctccaccagctgttgggcactgagggaaaacctacttttgtgaagtattgatatctttcacccaacttaacatgatttgtgcttataatatgttaaataaagtaactgaaatcctgaaattaagactacgaaactgtatggtgacagtcatttttactggaacaatgcattccctttatatgggcacaattacgactcagttctgagagcaatagaaaagatggaaagagatcttcctggacttttttacgcaggtaatctgtcatttgcttgttgcgataaagttcatgtacagttggcatatcaatcaacttgcattctttcttgctaactccaaacaatcaggatcattaacttgtaggctgcagcaacagagagtatctcccaagttgttaggtttcatgtaacctcgtcgctgagatgaaatttccgttggctaaaaagtgaaagttttgtattgatgttacccaaaacaaaagtattttgcatgttgcttgaagttttggttgtttcagatagtacatcctttgacatgaaaataaatggaaaagcgtatgtcaagcaattatcatctagtttctttgtttctagatactagccgcatttgatcccagatcatttttgaggaagtcagctgaaataccgtagctatccttcagttttcataataaaactttaatggatctgatgtacagtaatttagtgtgcaccgggttaataattgatattaacttcatatagtgagtcttataaagatataatgaacttatatacaatatagtggattttattaatggaaaacatatagtgaaactatatgcaatatagtatgatacataaagacttagacaacaagagcattcgaaattacaaagaacaaaggaaagaacaattgtatcaaaccggttcgaatgaacaaacaaccaccacttccacaatcaatgtaccaccaatcaagactaaactataacaatgagcttctagtttaagtctactttgagttttaatcaccaattcaacgattagatgatcaaaattgcaaaggttaagagttggtcaaacctaaccaagagttacactaggcacatagctttgttaggagtatattagtttatgaattctagttaagttagaaatccaatacctagttggattaggattcctaattggattagaattatagtttagttagaattctagtaatagtaggcgtgtgattaggagatataattagcttaattcttatattgttagtttaattcttatcctcgttttaggtttatctttagtcgaacttgtaccctatataaggggcctttatttcattaataatatagtttattttgagtttaaacctttacttgtgattgtttgcttgagaggttattaatcgaaccattaataacttttcaggattgttaagtttttagtgttaaacatcttaatttcaggagtgattttaagagtgtttagattcttgtattcaagtttcaggactgatcttgaatcaagaaatatccctagtttcgactaatatcataagtagttcgaattcttggagtcttttcttcaagattcatattcataacttgattatttagacttcttggttttgtaatcatatcaagtggtatcagttttccagggaggagaggatacaaagggttctctttgatcaaagaagatccaagggcatcaataagaatgacacttgcaataagttcgagtgatacaaacaacttcaagactcgatcttttgctaccaagaaccaatcttgacgcctgaagattgttaggacaaaggataagaagtgtttctacatccaagattgcattctttacgtccaagattgcgtcaagatccattctttaagttcaagaaaggagtagaaagcattcgaacactacttaaacatgacatccgagatggataagctggctatggccatgagtgccttggcacaatcacaaactgagtcacgcaaccacatgggtaggatggaggcacgtgaccgtggattgaaactagatgactatagtggagatggcaatccagaagacttgttggagtggatttgccaactaggcaaagtgagtgattataggggctttgatcacaagaagagattcaaggttgcttccattaggctcacgaagtatgctggaatacggctcgaaggattgcatgcacaaacttcttgcctaatgactatgaacaaaaacagttcataaggctcgcatcaataagccaaaacacacttagtgtacacgaatacagcatggagtttgacaaattagggcttatatgtgacatagaagagaaagagcaatacaagattgcaatgtacattaaagggttgaatcgatatatagccaagaagatcgaagtctcaacttatcacttctttgaggatgtgactaaattggctaagaaattcgaagagcatgacaaagaagaagggcctaagagttcttacacacctaagtatgactctagtgctaaagggaaatcaacagttccctactcaaggtggtcggaaagacctaagaaccccactacacctaaggaggacactagcatggagaagacaaaagtggccgtacctaaggagagtttaattttgtgttttatacatctttgcttaagagcttaacaattgaaactattaataacttttcaggatggttaagtttttagtgttaaacatcttaatttcaggagtgattttaagagtatttagattcttgtattcaagtttcaggagtgatcttgaatcaagaaatatccccttgttcaactattataattgatcttattcgagttcttggagttaatttcttcaagattcatattcatacttgattattagacttcttggtttagtaatcatatcaatatcattagcattaatttacccccagggagattaagaaaggattagcctaatcaaggcgcttaagaagtttttaggaaaaatcgtgcttgttaagcttaagaattgaacttctttcaccatttgcccttgattctcttgttgaactagaagatcttggttcatagtagatgctcctgcatcatagtagagcatttaattttaattttttaacatgcacgaagatgtaggtagtgtagtatatatcgtgagacgtggtttaacatatagaaagatgtagtttctgcatgatatagtgagtttttgcatgatatagtgaatgtctgaatgatacagtggatcgttccgaattgttgtagtttgtatgatatagtatttttgtgaatgatatagtgagtttcttcatgatacaatgggtttctgaatgatatagtggattgcttagaaatgatatagtgagcttttgtatcatgtagtaggtttctatgtgatataggttgttaaaagatgatacatgcttttggcctcatgtactctaatgttaacgtgaacccggtccttgcaagtcaattgcagttttttcaatattaagctatttttttttttttttttttttttttttttttttttttgtacgggaatatttagcatctttaccacaaacataaccatacgaatattatgcggaaattccagtctgaagtcttaacttttcaaaattaaaagcttctatattatttttggaatgaaaaaaaatgagctatggcatgttattttgaaatacaatgagtctcaaggtgcatagtggcttcaattctacgaataatgaatggactactgatttctaattttttgttccgggcttttgcattaggtaaccataaagatggactctctgtgggaagaactatttcctctggatacaaagctgcggagcttgtgatatcctatctcaactctacttaagatgcctaaatgatcgaggagactccgtaagtcctttctctgattctatctttgaactgagtggaaacacgactgtggtctaaagtagttgatgtctcagatatccagaaatggcgttagtgatattcaggagctgtccattgaccctttgattcattgttgcagtttactgaaagttgttagctggtctcagaaaaacgaaaggaaaaaagggggaaaacaaaaacaaagaaacgtagattgtggtgttaaaatcaagaattccagagatttgtaccttctttatcagttgaattgtttacagtgtgaatcaagaagttagctcgaccttcttttcttgtgaatggtaagatttcgtgatcatcaatacttgattgtgctgtttgcaacttcaacggtaagatttcctgatcttacagtttaattgcttgtgctgtttgccactt

SEQ ID NO: 2 - DNA, 1575 bp, Beta vulgaris
  source 1..1575: mol_type = other DNA
atggtaatgctatacgattctcacctctcaggagtctcaactcatcttcaactatcgcaggcatttcccaggaagaacccattaatggccaaagtgtctgagccgggtaaacccacttctgctaaaaggattgctgttgttggtgctggtgttagtggacttgctgccgcatataagctaaagtcccatggcttgagtgtgacattgtttgaagctgatactagagctggaggaaaactcaaaactgttgcaaaggatggtttgatttgggatgagggggcaaatactatgatagagagtgaagcggaggtcacgagtttactcgatgatcttgggcttcgtgagaagcagcagtttccaattgcacaaaacaaaagatacattgcgagagacggtcgtcctgtgctgataccttcgagtcccattgcacttctcaagagcaatatcctttcagcgcaatctaagctacaacttatgttggagccattcctttggagaaaacgctatgcttctaagatttctgatgagcatgctcaggaaagtgtgggtgagttttttgagcgacattttgggaaagagtttgttgattatctaattgatccttttgtcgcgggtacaagtggaggagatcctcagtctctttctatgcgtcatgcatttccagaagtatggaatattgagaacaagtttggctcactaatttccggattaattcaatctaaactgtctccaaagaaggaaaagggtggaggaggaaagccttcttctaatgaaaagacacgcatacgtggttcgttttctttccagggtggaatgcagacacttgttgacacaatatgcaatcagtttggtaaagatgaactcaaactacagtgcaaggtcctttcattgtcctacagtcataaggggatcccttcttcagaaaattgggtcgtgtcttctgtgtcaaaaaattccattgaagatcaacaatatgatgctgtcatcgttaccgctccaatcagcaatattaaagaactgaagattctgaaagctggagttccattttcacttgacttcattccagaggtgagttacctgcccctctctgttatgattactgcgtttaagaagaccagcgttacaagacctcttgagggcttcggagttcttatcccttcgaatgagcaacataatggactgaagactctcggtactctgttttcatctatgatgtttccagatcgtgctttctccgatatgtatctctatactacctttgttggaggaagcagaaatagagaacttgcaaaagcttcaacggatgaattggagcaaatagtttcgtctgatctccaccagctgttgggcactgagggaaaacctacttttgtgaatcatttttactggaacaatgcattccctttatatgggcacaattacgactcagttctgagagcaatagaaaagatggaaagagatcttcctggacttttttacgcaggtaaccataaagatggactctctgtgggaagaactatttcctctggatacaaagctgcggagcttgtgatatcctatctcaactctacttaa

SEQ ID NO: 3 - protein, 524 aa, Beta vulgaris
MVMLYDSHLSGVSTHLQLSQAFPRKNPLMAKVSEPGKPTSAKRIAVVGAGVSGLAAAYKLKSHGLSVTLFEADTRAGGKLKTVAKDGLIWDEGANTMIESEAEVTSLLDDLGLREKQQFPIAQNKRYIARDGRPVLIPSSPIALLKSNILSAQSKLQLMLEPFLWRKRYASKISDEHAQESVGEFFERHFGKEFVDYLIDPFVAGTSGGDPQSLSMRHAFPEVWNIENKFGSLISGLIQSKLSPKKEKGGGGKPSSNEKTRIRGSFSFQGGMQTLVDTICNQFGKDELKLQCKVLSLSYSHKGIPSSENWVVSSVSKNSIEDQQYDAVIVTAPISNIKELKILKAGVPFSLDFIPEVSYLPLSVMITAFKKTSVTRPLEGFGVLIPSNEQHNGLKTLGTLFSSMMFPDRAFSDMYLYTTFVGGSRNRELAKASTDELEQIVSSDLHQLLGTEGKPTFVNHFYWNNAFPLYGHNYDSVLRAIEKMERDLPGLFYAGNHKDGLSVGRTISSGYKAAELVISYLNST

SEQ ID NO: 4 - DNA, 37006 bp, synthetic construct
  misc_feature 1..37006: note = d209 mutation Beta vulgaris PPO2
  source 1..37006: mol_type = other DNA
tattccatcgaatgtagcaaattgactgtccgttgcaatttcggagtttccactcgtcgcatggtaaatggtaatgctatacgattctcacctctcaggagtctcaactcatcttcaactatcgcaggcatttcccaggaagaacccattaatggccaaagtgtctgagccgggtaaacccagtaagtcaaacattcgaatcacaactcaagcaaatttgtcttgtttgcgttatattttgctcatttcagccttttttgtttttccgacctttgcatactgaatattgtgtgtgtgtgtgtgtggggtttcagcttctgctaaaaggattgctgttgttggtgctggtgttaggtaaattttcgtctcttgcagagtttttgagtcatttgggaattctatgtgaaacttgtaactcccttcagtccaacgaacgcagtacaattttctatcaaatcatggtcctaatttccaattttccatatatattgttggaattatattgggattgtctatcactattaatagtattaggatcaattgtagagaagcacagaaatttttgggatcgaaagaatatctggattgccacattaacagcagatataattcttccaattggtttttggttcttcctaccttgacttgtctggtcaaacattataaactttaacctttaatatccattaaagtaaactataggatttttttgtctaaaacatgcttatataacatgaaatttgtgagaaaccaccttatatatatttttttgcgaaaacaaaccttaaacaaaattattatcgtgagaacaaaccttatgccaatttcgatcattgacccaaggttttggcattgaccgtgtcatgaattttgttgggtttaaaaagtcatgtgtcttgcatacgaaatggtaaatgcgggaaccttgggtcaatgtttggaatccgcataaggtttgttctcccaaaaaatgtttttgttcaaggtttgtttttgcaaaaaaacttatataaggtgctttctcagaaatttcatgttttataaagtagtatttgacaaaaaaccctaaaatatattatagaattattattgactaaattgtgtaaaaatgtactcttctaaaagtacattatagtattttagtggaacatttgcgagaaactactttataaatacgatttttgcgagaaatttcctaataaaaaaatgtgaagtgcaaaactatcttattgataattttctactccctcaaatccaaaatactatgaagtctttcctttctggtttgtcccagattagtttgtacgcttccatctttggtatgatcccacttttattatacttattagttttacgtgagttccttactctatctcttttaacaaaaatactcaactatctctatccaataaaaagttccttactagtcctatcacatctgctttttaataaaataacgtttgataaccacacaacttatatccttaaaatacacgttcaaccaagtgttgagattaatttggacggagggaataaatattttttgaggcatattggtagcagtattcggattccgataggttgactatgtttccaatgttgaccaacacttgccttgcatgtaattctaactttgctcttttttattcttcatttccctcgtattccatatacaatgtttagagacccattccttcctcttctcttctttcccttccttactatgctttgccataatcttcctcaaatgagtgcaaattaatttgtcgttgatgtaggccaactgattgtagcacatcttcatagttcatacctcaacacactcgtaattatattataccctacatgttaaatggctcatgaagctttattttatatcatacttcctccgtttcacaataagtgtaacacttttcttatttggaataatcacaataagtgaaaccaagctccaaatggtaagaaaagttcactcttattacaaatataccaccaaaaagtaagaggggatcacaacttcaatacttcttcactctactttattgtggtcccaactttctctctctaaattccttggtaactccccactttctctatgtttcacttatggtgaaatggaggaagtattttgtagtggtatttagctactaggccttggatgatatacaatcatacaatgtatttatattcacgataatttgctgcccaccttgattaccatgatttccaccaattttatcaatttcagtacttcaccaccccgaatttatattttttatttccaaccttggtatctccatttgtctgagtgcccgatccatttgtatcgcctccagaattgaagaagcttcctgcagctagacaattaggaaggttaaaaaagtttggagatggtggaggatagccataataatcattgttgggaggtggaacttggaaggttattgtagggttgaagtccttgatgaagaagaattgagttcaaatgagaggaaaaaggagcagggaagagggacaataagaaaaaaaagggtaaactaaaatcacgtgtaaggcatgtgcagatcaacatcagaaagcatagtcaacctactggtattagggcactgatacctttttgggtcaaaatttttttacaaggtatttcatgaggtagttttgtccatttttttttttacaaggtatcgtctcattttttttttatcatttagtttctcgcaataagtgtatttcatgaggtagttttttccaaaatttcctcatttattataaaatacctcatcttttccataaataatgcaatgtctagacttttacgctgtttacacatgctcctttgaccatctattgacacacaaggaaaaatagagtagagtcatgcaggatcttgttagatttttctcgatatatactttcaaaagatcaatttttttataattttttttttgaggggattttttttttataattatgtacttatcaaaggtcaaagttgtgcaccgggaagcataaaactctatgtgttgcaatttacatggaaggggaggagtataataagagaaaattatggtaaaaggttcattcctggagatcatgagaaaggaagtagaaagaacaaaaaagaacaatgggagtgcttttcaatgtttgttgtacgtagcatttattcatttgctataatgttttgtgacattgtagtggacttgctgccgcatataagctaaagtcccatggcttgagtgtgacattgtttgaagctgatactagagctggaggaaaactcaaaactgttgcaaaggatggtttgatttgggatgagggggcaaatactatggtaatgtttttgattattgcaggtcttgcactttagcgcacaattaatttctggatttttttttgtactgtggtggttatggtcatcaacatgtctcacccactgtgcttgcagatagagagtgaagcggaggtcacgagtttactcgatgatcttgggcttcgtgagaagcagcagtttgtaagtctttcattatctgaatggcacatactttatttcgaaagattgtaattgccttttctttctagatggcttcatcttcatgttgctttctgattcagtttcgtggctaactttccaagtttgtctgattgctaactctgtcatagccaattgcacaaaacaaaagatacattgcgagagacggtcgtcctgtgctggtaagtttgcttgttttacttttgacctcttttaagatctttcaactctggagcctggaaacatggtgatgcaggaggcaagttctctctattttacatcctttcttctctgtatcttatgacatttgcctcttattctgtgcagataccttcgagtcccattgcacttctcaagagcaatatcctttcagcgcaatctaaggtcgttttatgttaagacatacttgatgctgagagtttattgaattcttaaccttcttcttattttttttttatttttttagcaaaaggtaagtatattgcatttaccaaaaaacagtatgtacaccaccacagcagccatgtcagaatctagaaataccaccgaaaaaatcctacacccaaccagagacagttatattatatcctactcctaagtttctgtacccaatttacatcaatattggtccatttacaagatatttttataattcacagaagcacatcagttttaattagtttaataatgacctctggatgaataaccaactcagaccatatagccttattcctggctttccggaagttgtacgccagagcagcaagcacagcaatgcaaacctgtttcttatacctccttttatgtgtcttagcccatctcttatagctagtgaagatacagtcgtgtgcacaggattgaaccccaatccaactagcgaaagcctcacaacattatgactataaatacatctgaagtataaatgctgcacctttttctcctcttgcctgcacggtatcagaacaaatcccagctttagctaacaattccctggttttcagtttattcaatgccatcatgcaagcaatgaaagaatgttttggaacattcagtttgttccaaacacagtgagagcaagggacctttcctgcagttccacttagccacttatatccctgactaatagtatgactctttgcaccgtaaattgatttcaacttaactttttcataagcagtgaattgtgtgttgttagagtgtctagctgtctaggagattgggagaaaaggagggaccaaggagatagaaacacacctttgtgtttctttgtgtatttactttttagggtgggtcacgttttctgagaaatttgggaaaaggaagaaatagtaacacactttcccatttgtataacctgtatactggagctccaatataatttgcatttttttttgagctgcaagaatatgttgacaaacagttattgcttcttcctcagctacaacttatgttggagccattcctttggagaaaacgctatgcttctaagatttctgatgagcatgctcaggaaaggtaatgtcaagacatgtgttacctcgccttaattttcgttccaggaggtgagcatgcatttagaactaaaaggcacaaagactgttggtggtcttgcctgttcaaatataatggagaggagttttcgctacatttaccctctcttgaagtggggttgaaatatagcatcaagttgaatgcttgattaagtttaaaggacttgtgtaactctttttctgtttactgtgattacatgacctggttgattaacataatggtctgtttatctgtagtgtgggtgagttttttgagcgacattttgggaaagaggtaatggtttaccatagtatttctgctttagtggtaaattgtaatgttgctgataattatacttcgctgcagtttgttgattatctaattgatccttttgtcgcgggtacaagtggagatcctcagtctctttctgtaagtgaacattttgtgcttcactcccaattttttggaggctggaaatagattcttttccagttgttctgtcaaaaatagatgtagctttattttgaatttgaagttcccaattgttcattttgactattactgattattgctaagagtggcattatgctattatgctcctaaaagaaaggtgaattttgacctacatatagtataatgtatcaatattggtttaattgtttgttcttttgttccttttggtgctcatcttgcgccttgttctcatcgctcgttttttcatgttgcacttgatttaaatttgctcagcttaacttgtctttttgaatttatattacttattgctatattttactaatttcgttgaaactaattttttgctgaacttttcgttttgttgaaatcatttttctgaattaacttgattttcctgaatagaattgaattttggtgatcttaccttttctgcagccttttatttctttcttgtcctttttccaatctcatttttttatatttccattgtgttgacatcttatcattaactgtgcagatgcgtcatgcatttccagaagtatggaatattgagaacaagtatggaccataagacgtttattttaatcgacatgtatgtttcttagtttatacatatattaattctgtggtaaaaaaaccgaacaagaatatctttttttttttctatcatcaaaaagggtgaatatatgtagaggaaaaagatttgaatcaagatattagcctaaagcaataataatgttagtaatagctttaataacaaattcaaaacgtacattaatgaaccgagaggccggaaaatagttaaagtgaccactaagagaagcgaaggattcatgatgggttttcaacccagtagggcaaatttgttcaatgttctttacaaatcaagcttattaccttgtgggtgtttttgctagagatgaatgatagaattttccctagttggaagtcttttttggttactttatgggagctagtgatgtaatttgtttcgccttatggcatttcctaacatgtgcttttgtgatgtattgaagctttttttttgccttaatttatgctggattttaattttgttctttgtttcatttttcttgcttttgaaaaaaatatatagatatgtatatattaggattggtcgaggattttgagggaagggaaagacctaagaaaacttggatgagggtgattgatagtgatatgagtctatttgggatcgaagaaaatattcctttggataaggtgtagtggagggttgagggagcaaatttatgcagattagcttgacttaaagtttttctttttgattatttttcatttacttgtgttttgcaaacatttactcatgaatgatgtaaacttcttcaaccaaatctctggaaaaaaataatctacatggaaaaaacattattaatgttaacttgacagagatcccatccttgtgaagcagctagcaattaggcatctaacaattgacattttaatggacaggatagaatgtctcttgatagtcaataccctctgtttcattgtatcccatagctactaatctagtttgtatctttccaaagaaccattattttgaagtttcaccttgaacacccattttgaaccaatatgtttcttgcccttggggagaggggctaattgccatgttttgatgcggatgcaaagacacttgttctacctgagcctattgacttgatcatggatactctagggtttgaactcaagggaaagaatcaagtcttggcatgtgtggtgacatggcgtggggatggagtaaagaagagtcatagttctgttaggatatgttcttgcttgctacatagaatcgtagttctgttaggattgctatgatattatatctagtagatagattttatagttaattaggataaacatgtgatgatcatgttataataggcatgtgattagaggataggattagcttaattcttatcttgttgttagtttaattcttatcctagttttatgtttatcttagtcgaagttgtagccatataaagggcgttccattcattaataatacttagttttgctttgtgttttaaacatacttcttgattattgtttgcttgtgagctaactaatcaaaccattaaagacttttcaggagttttagtgctaaacatcttaatttcaggagtgattttaagagcgtttagtgatcttgaatcaagaaatatccttgttcttgttcgactaatatcagtggttttgttcgagttcttggagttaatctcttcaagattcttattcaacttgattgttgagcttattggtttagtaatcatatcaagtggtatcagttttccagggaggagaggatagataggattctctttgatcaacaaagatccaagggctatcaacaaggttcaaacattgctgcttgttcaagacttgatctttttctaccaagatgcattctttacgtcacaaggtagtaataacaagattaagagtggtttttacatccaagaatcaatctttcacgtccaagatttcatctttcacgtctaagattcattctttaagatcaagaaagttataacaagcatagaagaacacataaccatggagtccgagatggacaagcttgccaaagctatgcaagcacttgcaaagtcgcaaactgaatcacagagtcgactcaatgagaatactaccacaatcaatgggattggtagtaacatgaataggttggaggcacgcatggatgccattgcaaccatcatacaaaagaagcttgatcggaatagtgccaacttcataggtgccaattcagaggaagagttggcagaacgtgaagaaagatcatccaagactacatacaatgatgatcgtggcttaaagttggatgactataatggagatagcaatcgagaagacttgttacagtggattcgacaacttgagaaggtatgtgattatagaggctttgatgacaagaaaagattcaggattgcctccataagactcacgaaatatgctggaatttggcttgaaagcttcaaggcacaacgagccaagaaaggtaaagaaaagttgtgtagttggacaaagttgaaagttcaagcttaaagagaagttcttgcctagtgactatgaacaaaaatagttcataagactctctactataagccaagacacgcttagtgtacatgagtacaccatggaatttgacaagctagggcttatatttgacatagaggagaaagaacaatggaagattgcaagatacatcaaaggcttgaaccgccacattgccaagaaggtggaagtatccacttatcacacctttgaggatgtgacaaagttggctaagaagtttgaagaacatgagaaggaagagaagcctaagagttcttacacgcctaagtatgatactaatgctaaggccaaggctagcttcctactcaaagtggtatgaaggacctaagaggctaagaacctcaccccacctaaagaagacacaagagttgagaagcctaaagtcgtcgttccaaaggagaaatttgaagagatgagaaagtgcttcaagtgtcaaggaaggagacacatagcaagcaattgtcctaacaaaagagtcctcaccatgagacaatacctagctttgcaagaagaggaggatgtctattagttcgtccctgatgaagagcaaacttaggggaagaagaggaggaggatgcttttgctgaggatgatgcaaggctagtaggggtcaagaggcgcaccttacatgtcgaccatacacctagcatggagcaaatggaaaaatcttttccacactagatgcaaggtaggtgactatatatgtaatggtataatagatagtggttcttgcactaatgttattgtatctgaggtagtgtcaaagctaaacttagctacaagggcacaccctaagccatacaagttgagtttgctagatgatagcactggcatgagagtaaagaaacaagctttgatttcattctctataggggttataaggatgagttatggggtgatgtattgcctatgagtgcatgtcatctcttgcttggaagaccattgcagtttgataaaaaggtcatccatgagggggactctaatgtgtactctgtgttggttggttctaagagggtatgtttgcatcccttagctcctcattcagtggcgccaaagcaaccacctaagacaccaagttactttctatcttcaagggagttcgaacaagaggtggaggaagaaggttgtgcttatgccttgattgtaagacatgctgccacaagtgtcaagactactagcaatgagaagctcgaagccttgatgaaagagtttgaggatgtctttctagaggaactacgacccttgagaggcatagaacatgctgtagaccttgtacctggcgcccctttgcctaacaagcctgcttataagtgtgatccagtggcatctagggaattgcaacgccaaattgaggacctaattgaaaagggctatttaagggagatcatgagtccatgtgttgtgccagctttactagttcctaagaaagatgacacatggaggatgtgcatagatagtagagcagtgaacaacattacagtcaagtaaaggtttcctatgcctagattggaagatatgttggataagttacatggggcatcaatcttttctaagattgatcttcgaagtggctaccaccaaatgaggatcagagaaggtgatgagtggaaaacaacattcaagaccaagcagggattgtatgagtggatggtgatgccatttgccttatgcaatgcgccaagctctttcatgagcttgatgaatgaggtacttcgtccgttccttaacaagtttgtggttgtttacatagatgatatacatatctatagccaaaatgtggaggaacacttgttgaacttgcgtagcttattcatgaagcttagagagcaccaactctatggtaagattgatggcgacgaggttgacgggggattatggcggcagtgaatcaccctctttgccggtcactgaaatacaacctgaggtatctttaaattctgtaattggattgactaacccaaaaactatgaaattgctgggaaaaattgctggatgtgaagttgtggtgatgattgaccctggggcaacccataattttttatcactagctactgttgagaaattagctattcctgtgtcggaatcggaaggatttggggtttctctaggggatggacaggcggtgaggggtagtggaatttgtagaggggtgttattgagtttaaatggtggagttgaagtggaaacagattttcagcctctgggtcttggtaattcggacgtgattttgggtgtacagtggctggagacgttggggacagtggagagcaattggaaaacacaaacaatggggtttgaaatcgagggtgtcaagttcactttgaaggtgacccatcactggcgaggtctcgaatctcactcaaagccatgatacgtaccttatgtaaagagggtggaggtttgtggcttgagttgaaccagattgagcattatcaggagaaaacaccgcattcatcagccttacctgaaattccagttttcttacagagagtccttacccaatttcagtctgtgtttgctacaccagaaggcttaccaccgataagagaacatgaacatgcaatagttcttagagaagggtgtaatccggtaggggtaataccgtaccgttatccacagttccaaaaagatgagatagagcgcctcatcaaagaaatgttggcttccggaatcatcaatccttccacgagccctttctcgagcccggtgatattagtgaagaagaaagatgggtcgtggcggttttgtgtagactatcgggccctcaataaagaaacggtccccgataagtatcccattcccgtgattgatgaattgttggatgagcttcatggggcaacacttttttcaaaactcgacttaagggccgggtatcaccagatccgggttaaggccgaagacactctcaaaacagcttttcgcactcatgaggggcattacgagtttttagtaatgccatttgggttgacaaacgcgccggcaacgtttcaatcccttatgaacgaggtcttcaaaccattcttgcgcaagtttgtcttggtatttttcgacgatatattggtctacagtagttctgccaggaacatgaggagcatttgaccttggtgttgcacaccctagcagctcataaattgtttgtgaatcagaagaaatgtgattttggcaggtcggaagtagcatatatggggcatatcatctctggtcaaggggtggctgtggatatggagaaggttcaagcgatggtggaatggccccttcctaaaaacctccgggaattacggggatttttgggccttacagggtactaccgcaaattcgtacttcactatgctcatatagccaagcctttaactgatcaactcaagagagatgcgtttgggtggtctgaggcagcaactcaagcctttgaaaagctcaagaaggcgatgatcacatcccctgttttggcaatgccggacttccaagagttgtttgtggttgagaccgacgcatccgggtatggtctgggggcagtgttaatgcaaaacaaccgacccattgccttttacagtaagttgttaggtgcccgggctcaattaaagtcgatctacgaaatggagttgatggccatctgcatggcagttcagaattggagatattatctgctgggtcgacatttcctcattcgtacagaccaacagagtttacgtcatctcactcagcagcgagaagtaagtactgccttccaacgttggatgagtaaacttatggggttcgattttgaaatacagtttaagccggggtgtgccaaccgggtagctgatgcattatcccgcaagacagtgggagaggttgaattgggtgcgctgatattaactcatggggtggactggaccgacttggagcgtgaaattgaaggcgatcctctgttgtgcaaaattaaacaagacttccacgggggtgctattactcctgtgcacttttctttggtggacaacaagctgttgttcaagggtcgatacgtgattcccagctcttcggtttttattcctaccttgctgcgagaatatcacgattctcccattggagggcattcgggggacctcaaaacatatctcaggatggctgccgactggtattggaggggcatgcgcaaggatgtggcgcggtatgtgcaacattgtagcgtgtgtcaacaacaaaaaatgtctcaacagatgccagggggggtactacaaccactccccataccttcctcggtttgggatgacttgtcaatggacttcgtggaaggcttgccatcttccaagggggtaaacaccatcctcgtggtggtcgatcgtttgtctaagtacgcccacttcctcccactacgtcatccatttactgctgtgtcggtggcaaatgtgtttgtcaaagaggtggttcgtttgcatgggtttccttcctccattgtttcagatcgggatcgaatttttatgagtgtgttttggcgggaattatttcgtttacatgacaccacactcaaacgaagtaccgcgtatcatcctcaaacggatggtcagtccgaaatcgtcaatcgagctctggagacttatttgcgttgctttgtgggggaatacccgcgctcttgggctcagtggcttgggccgaattttcatataatacttctcctcatctctctaccaaaatgaccccgtcaaggtcctttatggtagagaccctcctactgtgatacgggttaatcggggagcctcacctgttgaaagcttggaaaacatgctccaagagcgagacgcagtattagatgccttgcagattaatctgattaaagctcaacagaaaatgaagagtagtgctgatgctacaagaagagaggtgcattttaaggtgggagatcgagtgtacttaaaattacagccttaccgtcagaaatctttggcttaacgcccttatgagaagttagccgcccgtttctacggaccatttactattttacagaagattgggcaagctgcatacaagttacaacttcctgtttctagcaaggtgcatccggtgtttcatgtctcccaactgaaacaggccgttggttccattcccgtttcagccactattccagagcaattgtcttctgacttggagttagaggtggaacctgatgaactcctcgatgttcgtagtgtttctagaggccagcacacttacttggaagctctcattcagtggcagggattaccatcattcgaagctacctgggaagatgtggctgctttccatcaccattttccatccttccaccttgaggacaaggtgaaactttgggggggtggtaatgtgatgcaccaaactaccactccactactcacctattagaggcgtaagaaaaagggggtaaatcaggaatagtttacaaattctgttgaaaggaatattttgtaattatgatgtcagaggttgttagcaaaaaggcagtagagtaacaataaaaaggggaagggaggagagaagaaggtattgagatttttgtaaggaacttggcccttgggagagttgggagcctctcgaaagctcaccattatcttgtgaatattttccttcctggttatatacaagaaccttcctctgtcaatttcttttctctctaatcttatttcttattctgttttctggttgccattgtttgaagttgcttgttgtgcttgagtaaatacgtgaagtggtgaaacccatctgaattcatcacatctattccaagtggtataatacaagcttgtaatccaaatctaatgagaaatctaagttatgaagaatttcaaaagaactaagtacccttgttttggatgcccaaggatttacttgccgctcaagttaatgctcaacgtgcaagatacaacctctttagtatcccaaggtagtttccataagaattaattgagctcaaatcaagaacaatatttttatgtattaatgtgaacacttcctgaattatattagatatatggtctgaaggttggaagaaagattagcttttaattttaagtttgagatagtttttagaatcgaggaaagattagctcttaacttgtaaactaaggattgctttataagtaaaacattagttatggaactcttaaaattggttttgaacatttctagttaaaaatcccatgtaattctcccaaactagcttaaaatctcacatttcacaagctaaggagagacaaatggcgttctcttgtgaaacaatctaaaattttcattaggctactgttttcaagtatttatatgttagaagtgccgcatataggtacataaaataagtttacaaacacaagtaggaataaggaaaactaaaagagaaacttcagccatacaaaaccggctgaaatcagctactactttctactttctagcttcaaaatctgattgcaagtctcctttaagccaatcaccaatgaaaacctttcctccacatgaagtgtgctcaaatcaagagaagaaacccatcattcgcctatagctacctgggtcagatgaagatacggcaaaaaaaacgctggaaatcagtgaaccaaaataagcaccaattggatgctttctgtccttgctacattttcttctcataggactacttcaagccatacatgaataagcagttagatccagctcctagcatccatttgatcgtacaaatgagctccaaaaagataagtaaaaccaagcagccaaaacctaattaatactaatgatgaattagttgaatagctaatgacgatgaagcaacactttagtaggaatagtgttaattatgatcaatgctacttaatcttctgattaatttttggaaaaatgtcatatctaccttctgtatacacttattcataactatatcgtattattattatttttaaataactaccttttaagtaccaaaacctaagaaatcaggcacttgatggattccatccaaagatccatttggcggggcccactaactgacttttgattttttgcctttcctcttttggttaatctcaatggttcatcaataacaactcaatcttctccccatttcatcaaatcatccctaaatcagaactttttcaaattcacccaaatgaggttatggaaacctctaccaagtttattcgaccacttttagtctagctcaaagttttacacttgcttcaaaaactaagatttattaactttagaaattaggtttttatttttattttttatttaactttgtaacaatcttaaataactcaggtgctttctagagtttggctttaattgtttttcccttggttatgtgaaagaagtatgactactttctccaagactaaagtagagagcaaaaaatgcaattctggaatttcttgcaaaagaaaaggaacgagttaatgataatgaaaaacaaagaaaatgatgagaagagaggagctgaatcaatcatgatcatgtattttaaagttttttttgctattgaagtgacttaagaagaggaaagaggatgagtgaagacaaacaaaagaaaggataaatagagggaaatcttgggcttagaaaggtgaaaaggtaagaagatgagttagtgggccccaacaaatgtatctttggatataatccgtcatgccactgtttggggcttgcttaagtccatacattacttcactaattttacaaaatttattttcttgaccaagaactgaaaaaaccttcagtggtgatctattaggttttggaagttaaaaggtagttatttaaatgtttttaatataaaaggtagttatttagatatttttaatataaaaggtagttatgtgaataaaagtgtatataaaatgtaattttttgacatttttgccttagtttttcttgctaattcaccttttcaacttgaccaagttgctatgaggagaaaacgagcaattattaagcaaatcgcaacactagcattaatccatggcccatgaaactctccataattagagattggattagcacttagtagaacttcttgctcctgctccaggtttccattacttctttatctaagtgcatcaaaaggttgttgggttatgaaaggtggtggttgtgtatagtcattgtcaaaatgttgttaatgcactctatttagaggatgagggattgaatagttttcacctcgtgacctttcattcctttttaaaaaaattgataatgtgtattggtcctatgactgtatgaatggtaataagctatctcatgagctgttactatcttcctcagagtctaggtagaagggtttgggctgataattttctactatgtgcaattagtttgttggatttggatatgctagttgatataggtcctttcccttgggccttctcttaatataggcctacagtgtgattgaagataaatcttctggagaatataagaacaatgagatggattggttagaggttgatttgttcttttggtgtaagactatttcgggttctctattggttatgttcagacgccagaatatgtgttggtgattgttttccatgaacatactttatccgcagagacatttttcttttttcttcctataagattatatttgtttcctctcttggtgctcatctcagtgtctctactttacgttaaactgttgacattacttgacaatgcgtatatttgtcgcatggtgctcttccctcactccacgtcgaccccatacatcaaaaaatgccattaaagaatattcgaactcacaaccttgtgttgaaagaatggaatccctaccaatgactcattaattcattttctctttaagaaataaatgatttcctcacaaacttttaggctttaagagcccaaaagataaaaacataaaataagatagacatcaacgtcaagattagccttaaatgcacaaagcacatgtcaaatgattgataactactcacgagttgcaactctttgggcgttgcctaatattaattggatctcttttaaaaattgttggtggttatggttggtggagaggaccatgtaacttttagctggtcacaactggtaatgattgtcacttttactgcccataaaaaaatttaaactgttgaatatgtttctggcagtggatctgacaaatcctttacaagttggcgtccattttgttttgccatgtgactcaattataatacgtgagttttattatccaccaggtttggctcactaatttccggattaattcaatctaaactgtctccaaagaaggaaaagggtggaggaggaaagccttcttctaatgaaaagacacgcatacgtggttcgttttctttccagggtggaatgcaggtattagcatgtagctttcattctgttaacatttgtggttcttccagacatacatccaatgctttttttttttcttgctataaccataaacattcttgtcatgaacattctttaatactgttgctgagcttagtgtattcgttcattcatgtaatttcctctcttgaggttaaaatggcatacagccttacaacctatatccataatgctccttagagtagaatccctaggttataacatagtaccacttatcaaaataaacatggcacacactgcaggacaagaagtaaatccacctagagaactgagcacctagtagtaaaagcagcgatacattactaataacagtagcagggccataagagtagtaaatgggcctcatttcaacactccccccgtaatggtgagagagaagaagcagtctgaactcccagcttggagagcaaaatagagtgttgctgaacagggagaaccttagtgaaaacatctggcacttgatcttgagatggaacataggtaggctgaataaccccttcttcatttgtattgtccctcaggaaatgacaatctatgtctacatgcttggttttctcatgatgaactagatatgctgctatggcaagagcagcttggttatcacagtagataggagtagcactggactttttaatgcgaagatctttgaggagttgtttgatccacatcacctcacacacagcaagagccatggatctgtactctgcactgaccacaagaaattgcctctttgactttcaagatacggggggagtcaccaaggagcacacaaaaccagatgtagaatttacaacacccatcccattcactatcacaaaatgctgttagttgagcactagacttgttcgccatgagaattcaccctgttggcagcttgaagatgcacattagtggggcagtgcataaatttgcttaaatcatgtatagtgaaggcaatatcaggcattgccttgtaatagtgagataaatgagcttccccatcaatttttgatacacatcaggttgttgaagaggatcaccattgtcagcatagagcttgacatgtgagtccatacgaagcctcaatcgtctgcaatttataaaaccatattcatcaacaagacccatcacatacttctttagagataaaaacgatacttcactacactgatccacttcaatcctcaaaaaatatcttaggccacccatatctttcatgtgaaattggccagcgaagaaactctttgcttcctcaatagttgctaaactattgccagcaagaatgaggtcgtccacatacaccaatatagcactgaaacagtgagagttttgcttgaagaatagagagtagtcacacttggattaagtgaatacattttgctttaaagcagtgttagcttggcaaaccattgcctcaaagcctacttcaagccataaagtgacttaagcagcttgcacaccttagttcatttggtgtcacttctgccatcagtacttagctccccctctccttgaactttgatcctgttacatgtttcactatatcctggtgatagcttcatgtatacactatcctacaattcaccatgcaaaaaagcatttttaacatccatttgtttgcaagaaccaaccctctaaggatgcaacaacaagcatgtggtcatctttgctacaggggtaaaagtctgctcataatctattccatatctctgtctgtcacccatgattacaagccttggcttatgcctattatttgtgccatcagtgctgtattttgttctgatccatccatgtgagggatggctcatttctacaaaatcctagttccgttaggatttgtgttgttttcctaattctagtaggaataggactcctaaaatcctaatcctcctagttctgttaggagtttaaaagttttagtttgattgtaattctagttgtgttagaaatccaaatcctagattcatgtcacgtatggttagaacatggctagtaggataatttgtcttgtgatgtccatagccttggcatttgtggcacctaactttcaatagcttgtcttctgtctccttttctttctccttctttgaggaatcaacgtttttagagctatctaaaccactagcatcaatattaggtttaaaagtgctaaaagatttcgaatagttcttacttgcatacaatttctttttctagtttatgtagcgtcaccagggaacaaaaactcggccgttccgttctggaacggccgctttgtaacggatttcagagaggccgttccgttaaataccgttctagaacggtgatttggaattcacaccaaactcggcgcgatagcgttacgtaacggtgtaacggcgttccagaaccgttacaatcacataacgtccgttatttgaagaagaccagttcttttggtggaggaagaagaagagccaacgcaagatctatagatctgagttaaaatttgaaaataaaacatgtttttttatttaaattaaagcttacagaggatgtagaactcaaattcgagtaaacccctcctttaatttcattaggttactgcaaatcgaaccctaaattgcaaaccctaatttcgaaaaaaccctaatatgcattgggatgcaacgctgcttctccggtcatggcagagaaggtcgacgagtcatcttcggctgcttttagcactgtagctgccggtggttggcttgtttgcaggttagtgcttgctggttttctttctctcataccgatcatcttcttcttttctctcttctctttttcttttttattgtgtgactgccagtcacgtgataattgcaactcataaagtatctctttctctctcttcttttcatccctttttatttttctttcccttttagtttttattccctcacgtggaatcacctaattttcatccttttttatttttttagttacactcttacacagaagtatgttcaaatatcattatagtacctcaaatattgtatttataagagttttggacataatatgatatagaaagtaaaatagaagaaaaataaagtttaaatgtcacttgtgtgatttttttaaaaaaattcacgccgcgacggccgcgaaacgttctatttcccgttacaagccgttcccgcgataacgcgaccgttcccgcgaacgcgaccgcgaccgcgttttttttccttgagcgtcacatcttgcaagcttcttcaaaggtgagttatgtgtacaactccaatttctctccaatcccctccgtcctcatttaggcctccaaggaagctacttaaacattgatcttcaagttcatcaattttccaaagaatggataacttctcgaactcctttatgtaatcttcaacggacatattcccttgtttaagagtagaccattccatgtacaagctttgtttgtagttagaaggaacaaaacgtcctcttaacaactttttaagcttatcccaagtagagattttgggtttattagctttcacacgctgcctctttactccatccaaccaaatagatgcatatttggttaccttaagcacggccaccttgtatttcttttcttttggtgtctcttaatcccaagtagagcttttgcgtgtgaaagctaataaacacaaaatctctacttgggataatcttcttcttgtttccgaaacaactaattcttatggtagttaggaaagcaagaatggtttctaattcaatagggaatatattaattattattagtttaagttaaatagtgcacgaatctaaatagattattcgtctcaaaatctcacttaagtatagatttgtttggacatctgagggaagaagaagagagcgagataaaggagaattatcactcaatgaatccatatcccgagttttcccatttacttctttgaaagcaatatagttcacgaggtcttattatcagtctatggacataagagtaataatttaagggcaaaaactatgactttatgggtttaaactgatacatgttctgttaaactgatagatgttctgtgttaaaccgatactcatatattcctggttaaactgatagatatatgatttaaattgatacccgtctcagtcatgtcttggattgagacggtctgacacaagactttttgtgtattatatatctgattagaataaatttatcctgtttactaattattttatcttctccagacacttgttgacacaatatgcaatcagtttggtaaagatgaactcaaactacagtgcaaggtcctttcattgtcctacagtcataaggggatcccttcttcagaaaattgggtcgtgtcttctgtgtcaaaaaattccattgaagatcaacaatatgatgctgtcatcgttaccgtgagttttactttgcttactgctattgcaccaatctttcttcttttgacacactgataatggcaatgctgttgtggtttgaagccatgttatggggttttagggatatttatggagtctgatctaatatgttattggataaaattcagatctgtaacgtgactcaatgagattgaaaaaaattgaatcaagataatggattggaaaattaggagctaacctagggtctataagcgatccacttggagtctcataccaagcaggtattcgacattttaggtttatattgctgctatggctcatatgggagcctacatagggtctggtgcttattcctttttcttttgtctagttttggggctgcacatttctgttgtgttttgatatggatagccatcacctgcaattgcatggaggctgaactaagttctataggggagcaaacagtatctgttggaaatttattttcatattgtgtttttaaatgctataatccaaaatttgttgttcccctaaaatgcctaaaatacccttatgtaactgctccatctgtcccttaatagacttcccatttctccaatgcatgtttgccaatacacattttgtattgttaatatcaaaaattacatattagtaaaaattataaaagtttgattttcctaatgtacgcaatgagacgaatcaaacaagacgccatatgactatgttttttcttatacttcctatgttttttaataagtgacatgttttccttttagggaaatgtcacaataagtgacacatagctcaaagtagtaaaaatacttctcatttattacatctttgccattatttaattgtttcacctacctactttatccaatactcaaatttgattggttgaacaattggtcccaactttctctagactccttggtattccctttcccccactttctctctgtgtcacttattaaaaaatggaggacgtatattggaaaaaaattggaaggttttcttcacttatgaatagtggtaaaattagagatgggaaggctattttgggatggatggagtaatatttaaatttttaaaataatgtcattgttttagtgatgaaataaaattcaaggctattttttctagtaattatgttatctgtacatcaccacacgtatcgcgtgcatataagactagtttgatgatattccaacactgttcgaaggaagtcaggcatggaaccatgtttgcttccatatgggaaatattttgcttactctccttcaaacatctacctcattatcccagaatgattgatcgaatctaatacaaatatacaattgatcatatgccaccagggaattacatcaaattaaatttttatagaaggggaatcagtcatagcctcatagggaacgaataagtgatactcgccagtttctttcctggttacttttcctcttctcactagccatcctttatgtatgggtatgctgcatcattcctgccactggttgggactcccgtttgaactatggggggatgggaaagctaagccatcatcttcaaattgagtttcttgagaatgtaagacaccatctgtaagatgaatatagtgcactctatagtcaatgtcatgatctttatgggtttatctgctgaaataactgtgatatacccagctctccatttacaaagttttcctacatattaaactcttgcccgcaattctagaacttcattgtagaacttttcctacataagcatcatttgtcttttctgtagtaaaagttagaaagagctttattttagaacattcgtttttagttttctttgttgttgattactccgccacttttaatacttttatgattcaagtatttgacaaaatcatgtaatttaggtcctctgctgcatgcagtctataccctctctctctctctctctctctctctctctgtggttgtgtcttacttgttgagttactaactccagccattacataaagtaggctggcattatgatgagcaaattactcaagaccacatgttagctcctttttcttttctccttattctgaaaggcaaatataggtccatcttggtgcttctcatgtcataagtaagctgaccccctccttttccagggaataggacaataatccaaaagtgagggttttacatgttgggatttgtgaagtttcttattttacttaatagccgagtcagtgttacaatacatagtaccgtgttacaaaatagtatgtaacaccaagcatgtttatgtgcaaaattgtgcaagactttgttgctggcacgccaagggctgttttaatgtagtttacttattcttttaggtttttcagatgacaatcataaagggaattaggagtgtttttattgtagtcaatccctattgtgctacaacgataaaagaaaaaagcacaagactagaaggagaagtaatgtctaggaaagactcctcacctggggttgctagtcacctacacatcttagaaggcatcaaaccaaagcttattcccctcgactgttttcgggagaaaagaagacaaaattgtttctaacttatactttaccagtttcactacagcatcagaaagaagcaaaatatgctcccacaacacggcgaacctagctttccagatgtgataaaccagaccagcaaaatgattattttcactagagctttgagtctattttttcggtttttccccttcttcctggtaatgtcacgccaccaagccatcatctcaattttttgagatttgacgtaatcgctcaaatagctgagtaagacacttcttgctctaaatactaataaaaaagaggtgaatgtgggtctcagccatgttactcaaatcggataaagtgtctactcttattagggtttttgggtgttggactcatccatttttttttgtaaaatgtcaagattttggtttgaaatgagagattcaagtgtcgtgacatgagtcggcacgcaacacttaaacgtgtcgaagtaacagagggtctcagacaatcaactttaatcaatcacgaaccccaaaatttatgcaacctttgctcatattcagtctctgtaaagcactcaactgcagcacacccacccattcgcttcacctacagcaggagggcacccaagtaattgctatgatgagcgaattattctgttttgccttgctggaatattgctgttagatttgctgactcactggcagttaattatagtcagagaatgagaaatatcctgtagagagagaaagggtatcttttgtatttagctctataaatagctaaggaagggaagggcattgagagtttatgatattataataggagagatttagcctctcgaatgctgataggagcgtagctcttgttggattatcaatactactctgtttgctctatctatttctactcaggttccttcttgtacagtggatccctgattggatttacttcatcaaccagcagataaaattatttgtaggcacattgaaaccattccaaacctaatgaggccaaagtttatcacaaagaatataggagccaaatgtaggcaacagataagagtataattgccagaagttgaagactccaggtattgttcagaaaccttaatgcatatcatcattctgacactagattttccccggagccaactaacaaaaatgaattaaagagattaaggctatgtttagttcacctgaaattttctgatctgaacttatctgatctgatctgaacttattttttctgatctgatctgatctgatctgaaccaatctgattacaagatcttatcttttagatttttctcaatatataagaaaaaatatagtcatgtggggtcttgtttgattcgtctcaatgagtactttattaatattcaattattataatttttactaatatgtaatgaaagatataatgatttttaaatataagcatgatctgaactgatctgatgtgaacttattttttctgatctgatctgatctgattagatctgaaataagcaaaaataaggtgaactgaacatagcctaagcaacaattgagggaaaataagatcattatggctaagataagataaatatgtaatgataaaatcagagtaattatatcagttacactctcaacattcgtcagattgaggtttcctcccaaaatgccaacccacttttctgtattttcacgtccttctctctacccttctaggtatatattacatcagctgtaaaatttttgaaccaactagtagaatactgatctaccctcaactgcctcactttctcattttttctgggcctttttctctctagcacaagtccacataagtgatgcatagcagaaatataattccactagtcatcctcaatattgatataacaaacacatcacccacatattatcatttttaatcgctgcatgcgaggcatacttacccaccaatcaggatatgcataacagcgttcctaattccaaaaccaccatatatcttgggtttgcaactctcatccctagcaacaaggggactttctgaaaaagtggcagattccgcccacaagtagtttgtacggacacctttattatattattaatatcatatttcggcaacacaaattaccagcccagtaaaacatgaattgacatgagactaacaaggggcccaatctaatatcgtacgtctgtactaagcaatgtataaaaaaaagctcaaggtgcattgatgcaatagggatcctaatgtgcataggtgcgcctcattgaagtgaggcaccactaaggataaataaaaaagattgatgtaaaattaaattgtgcaccttgggtgcgcctcgatgaactttttttgtgtgcctaagtgtacctcaagtacgcctcattgatatcgcctcgcctggcagaaaacgagcttgaccccaatcgccttgctccccaccgcctaggcgtgcctcagtcacactttttaaatacattggtattaagtactcagaatggcaaaaagaaactttgggcattaattagacatttcactttttgtgcaactatttgtgacttcagagattgatatgttttctacattacagacttttgtgatggctgcatggtctccactgtcaaagaacattagtttaagtagaagaaatattgctctattaccttcctccctctacaaacaaaatcctaaaatgtggttatgtagtgccaattcaaacttgtagatgcatgactaatgctttcattatgctgtgggtttttatactatgattcatgtccaattacataacaattagctggagtcaggatatgtcacggaaattttaagcctggcaggatgattgtttatattttctctttttcggtgtttaagtcaaagtaaacttctaggctgctcttttataggctagttgggctgttggggagatctacacattaagtgtgaagaaatcttgtctaactccagtttggttgagaactgtaagctgtcataacatttgttgcatgatgaggccttgtgggattatcatgttagctgtaaactctaaacttacttgaaatctagtgttgtgtctccttatttctgtagtcaaaattgaaccttctgtacgtttttgatacctgcgactagaatgatggaattctgaattactgatactattacaaccatctgctaagaacgaagatgactcttagctaatttctcagcagatttagagaaattaagaagaattactaatgaatatttaaagagaaaactaccaagatatgattgtattgatgaaaaacaccaattacaacctaaccaacattcgagaggttggagctctcccaagtaaccatttctctcactaaacttatcaattttcaagatgccttttccattctcagttcctctatatttatactactccccttagcaaactacccaacttattccccaagtaaactaaagagataatatctaaaatacccttccccctacaataatattagttcttagcattaccggccccctaaacttccaccttgtcctcaaggtgggtcgtaatcatcactaaattctgggcctctactcgtatattcagtgtcttgcagcccttcaggccccaagcctaggttatgcagctcgtgttgcggctcctcctcatatagttctctggctggagtgagtgcctcaactataatgaaaaagtcctggaggtggggaaggaaggagtgtctgaaatggtgtggtgtgctgctggtgttatgggcttgtgcctgaaagttttgggtttaaagagatggagtggagaagagtggagaagtgactggagacgtaaaagaaggaatcataatttttgtaagtggtgggttgaaaaagttggtgggaagaattgtttttataaaatgtagtgtaatggtcgaaaaatgggtggagtaagtatggtttttggctggggatgtggtactgggttgaaaataaataggtctgagcttacttgtaaaattggcctcaacatgagcaggcccaatatcttgagccaattccccaaaagctggcaatagagcactcttaattgcattgttgtgggccatcgggctccaaacatatattcggaggagccggacttctttggtgatgtcattagcttggcccattgcacactttcccttaacagcctcaagatcttttcccacttttgtaccccaaccacgtggcttcaccatcctttctttcttgcttttgtcacttttttggcaatatacgagtttgtccttactaccctcatcttctaatgttggcttcctcaccaagcttaatttctggaattttgtccaccaaatcccaccacccatcgtcaacaccatacctatctacaccggccaagaagcctggtcctccacccgaattttcgccacagacaaagcctgaacaaccgtcagttctctcaccggagaagttcacaggtccaccacctgacccactagttgctgatccacccttcacaaatctccctcctctggctgccacaagtagtggttcctccgtaatactcatatttctcgtccaagagccctggaccaccaccggacccacttccaccggcaccaacttgttcaaatgatacttctctttcttttccaaacagcctacttggactggaaaaaccactgcgattgtagcctccgccagatctgtagcctagtgcacctaacgtgcttccaactgcaacccaatagggatggaaatggatgggattcggggagggtggagcatcacccgcatccgtcacccgcatccattcgctccacccgctccacccgcatccatccatccgtcacccacgggtgaaacgggtgggtcggtgataaacgggtggaaccatttagggggtgtttggtatcatgtttttttacaaaagaaacagaatcaagtaacaaaatccgtttctacttgtttggttctatgttgctcagactcgagtacccatgtccgacacgggtacgtgtccaagtgtccaactcagctattttctagaattttttatattttttaacccaaaacaaagtgtccaagtgtcccacccatgtccgactcccgaggatccgacacgggtacttgaggtgaaatgaagagtccgagcaacggaggtttggttagtgtgtaaagtaacaattaccgttacttgaggaaaacacatccccccaagttgtttccattcaaaaacctaaggaaacaaataacgtttcactcctcaaacaagaggaaagggaatgggttatatttatttccattccattaggataccaaacaactaataagggtaacacttattattatcctttcccctccttatcaaaatcctttccattccgtttacggtattcataccaaacacccccttagtatattttctaatgaaatttgtgatatgatatgcatgatataaaataattctatcaaaaatataaaaagtaagtaaacttacatgtacaacttaatagatgggtgatgggttggaggttaaacgagtgatggatcgggtgacgggtgaagaaattctcacccaccactcgctttccatccatttaaattaggtttttcatccatttaaaaaaccgggttaaacaggtgatgtatgatccatcacccatttccatcctcaaacacatcccgatttgtttactgcaccaccagatccaccagtataaccacccgaaaaatcatcatgccttctactagccttgtaacctgctcccggtgagaagcttcttccacaagtggtggtcgctggacctccatctccttcttccccaaaaaattttccatgacacccactcgacccttcatctgtgacaacctcttcttcgtccacctctgaagttttggggtcgtcttcctcctcaagctcctcttgaagtaactttaacttccgttggatgggagagaacgcttcattgattatcttcaccagatcttcttgaagtttctcgaaactttttctcacgttttcctctacctctttcgtgatttcctttccgatctccttcatttttagactaggagctcttgcgattccatggcagatttctttttttaaaacaagaaaatcaggcacttaatctcccagaatagtggtgctctgataccattttctaagaaccaagatgactcttagctaatttctcagcataacaacaaatttagagaaattaagaagaattactaatgaatatttaaagagaaaactactaagatatgattgtattgatgaaaaacaccgattacaacctaaccaagaggttggagctctcccaagtaaccatttctctcactaaacttatcaattttcaagatgccgtttactactccccttagcaaactacccaacttattccccaataaactaaagagataatatctaaaatacccttccccctacaatattagttcttagcaccatcaaactgggatggatggttttgtaaggttccaatttacttctccatcaaaatattttaggattttttatctcatgtattttagagtttcctcgtccctttttatctgataagattcttctgatgatttgattttatggtaggctccaatcagcaatattaaagaactgaagattctgaaagctggagttccattttcacttgacttcattccagaggtttgtatttttatagtggttagacatgcttcccctagttttcaaagtaaaagcatccttgttgtgacgatattttttcccttgtttttgtttttattattatcatcacttatttccattttctattttccatgctgataagatgttcatcaccataatcttgtggtatcagaagtgtttagtggagtttattcactacacatgcagttgttcttttgccatgaccgccattcattttctcgtcaaaacaaatctatgaagtttggttttcagactcatggttcttgtagctcttgtgaatttttttttcttctccttgcatgcattcttcaaattacatattgcatataccaggtgctctcctttattttatatttaatttttaaaattctatcatatattttttaatgtcaaacctcaaactaggggttcactgcatcttaggcttaccaggctaatatttctttacttaaccttttccctttatatttgctatcctcttgtgtagtaatcaccataagaagggtacaaactaaattaccctcccattcttttgtatcattctgaaatagtgtcacagagctttgatttttttgccctcatttaatctggcaaatgttctctctatttttttttttttactttcttttgacgggattctcaggcaattgttacggggagcagccagtcacactgtttctgtttattatgcaggtgagttacctgcccctctctgttatgattactgcgtttaagaagaccagcgttacaagacctcttgagggcttcggagttcttatcccttcgaatgagcaacataatggactgaagactctcggtaattgtctggttcacgtgtgtagcgaatcagattttcaaaccctgatttcgtaacattgcaggtactctgttttcatctatgatgtttccagatcgtgctttctccgatatgtatctctatactacctttgttggaggaagcagaaatagagaacttgcaaaagcttcaacgtatgagatatgcaatgttttaaatgtatgctatagtcatcgtttcaaccttttggtgcctttttcttactaatttatcctcctggtttaatgatcttagggatgaattggagcaaatagtttcgtctgatctccaccagctgttgggcactgagggaaaacctacttttgtgaagtattgatatctttcacccaacttaacatgatttgtgcttataatatgttaaataaagtaactgaaatcctgaaattaagactacgaaactgtatggtgacagtcatttttactggaacaatgcattccctttatatgggcacaattacgactcagttctgagagcaatagaaaagatggaaagagatcttcctggacttttttacgcaggtaatctgtcatttgcttgttgcgataaagttcatgtacagttggcatatcaatcaacttgcattctttcttgctaactccaaacaatcaggatcattaacttgtaggctgcagcaacagagagtatctcccaagttgttaggtttcatgtaacctcgtcgctgagatgaaatttccgttggctaaaaagtgaaagttttgtattgatgttacccaaaacaaaagtattttgcatgttgcttgaagttttggttgtttcagatagtacatcctttgacatgaaaataaatggaaaagcgtatgtcaagcaattatcatctagtttctttgtttctagatactagccgcatttgatcccagatcatttttgaggaagtcagctgaaataccgtagctatccttcagttttcataataaaactttaatggatctgatgtacagtaatttagtgtgcaccgggttaataattgatattaacttcatatagtgagtcttataaagatataatgaacttatatacaatatagtggattttattaatggaaaacatatagtgaaactatatgcaatatagtatgatacataaagacttagacaacaagagcattcgaaattacaaagaacaaaggaaagaacaattgtatcaaaccggttcgaatgaacaaacaaccaccacttccacaatcaatgtaccaccaatcaagactaaactataacaatgagcttctagtttaagtctactttgagttttaatcaccaattcaacgattagatgatcaaaattgcaaaggttaagagttggtcaaacctaaccaagagttacactaggcacatagctttgttaggagtatattagtttatgaattctagttaagttagaaatccaatacctagttggattaggattcctaattggattagaattatagtttagttagaattctagtaatagtaggcgtgtgattaggagatataattagcttaattcttatattgttagtttaattcttatcctcgttttaggtttatctttagtcgaacttgtaccctatataaggggcctttatttcattaataatatagtttattttgagtttaaacctttacttgtgattgtttgcttgagaggttattaatcgaaccattaataacttttcaggattgttaagtttttagtgttaaacatcttaatttcaggagtgattttaagagtgtttagattcttgtattcaagtttcaggactgatcttgaatcaagaaatatccctagtttcgactaatatcataagtagttcgaattcttggagtcttttcttcaagattcatattcataacttgattatttagacttcttggttttgtaatcatatcaagtggtatcagttttccagggaggagaggatacaaagggttctctttgatcaaagaagatccaagggcatcaataagaatgacacttgcaataagttcgagtgatacaaacaacttcaagactcgatcttttgctaccaagaaccaatcttgacgcctgaagattgttaggacaaaggataagaagtgtttctacatccaagattgcattctttacgtccaagattgcgtcaagatccattctttaagttcaagaaaggagtagaaagcattcgaacactacttaaacatgacatccgagatggataagctggctatggccatgagtgccttggcacaatcacaaactgagtcacgcaaccacatgggtaggatggaggcacgtgaccgtggattgaaactagatgactatagtggagatggcaatccagaagacttgttggagtggatttgccaactaggcaaagtgagtgattataggggctttgatcacaagaagagattcaaggttgcttccattaggctcacgaagtatgctggaatacggctcgaaggattgcatgcacaaacttcttgcctaatgactatgaacaaaaacagttcataaggctcgcatcaataagccaaaacacacttagtgtacacgaatacagcatggagtttgacaaattagggcttatatgtgacatagaagagaaagagcaatacaagattgcaatgtacattaaagggttgaatcgatatatagccaagaagatcgaagtctcaacttatcacttctttgaggatgtgactaaattggctaagaaattcgaagagcatgacaaagaagaagggcctaagagttcttacacacctaagtatgactctagtgctaaagggaaatcaacagttccctactcaaggtggtcggaaagacctaagaaccccactacacctaaggaggacactagcatggagaagacaaaagtggccgtacctaaggagagtttaattttgtgttttatacatctttgcttaagagcttaacaattgaaactattaataacttttcaggatggttaagtttttagtgttaaacatcttaatttcaggagtgattttaagagtatttagattcttgtattcaagtttcaggagtgatcttgaatcaagaaatatccccttgttcaactattataattgatcttattcgagttcttggagttaatttcttcaagattcatattcatacttgattattagacttcttggtttagtaatcatatcaatatcattagcattaatttacccccagggagattaagaaaggattagcctaatcaaggcgcttaagaagtttttaggaaaaatcgtgcttgttaagcttaagaattgaacttctttcaccatttgcccttgattctcttgttgaactagaagatcttggttcatagtagatgctcctgcatcatagtagagcatttaattttaattttttaacatgcacgaagatgtaggtagtgtagtatatatcgtgagacgtggtttaacatatagaaagatgtagtttctgcatgatatagtgagtttttgcatgatatagtgaatgtctgaatgatacagtggatcgttccgaattgttgtagtttgtatgatatagtatttttgtgaatgatatagtgagtttcttcatgatacaatgggtttctgaatgatatagtggattgcttagaaatgatatagtgagcttttgtatcatgtagtaggtttctatgtgatataggttgttaaaagatgatacatgcttttggcctcatgtactctaatgttaacgtgaacccggtccttgcaagtcaattgcagttttttcaatattaagctatttttttttttttttttttttttttttttttttttttgtacgggaatatttagcatctttaccacaaacataaccatacgaatattatgcggaaattccagtctgaagtcttaacttttcaaaattaaaagcttctatattatttttggaatgaaaaaaaatgagctatggcatgttattttgaaatacaatgagtctcaaggtgcatagtggcttcaattctacgaataatgaatggactactgatttctaattttttgttccgggcttttgcattaggtaaccataaagatggactctctgtgggaagaactatttcctctggatacaaagctgcggagcttgtgatatcctatctcaactctacttaagatgcctaaatgatcgaggagactccgtaagtcctttctctgattctatctttgaactgagtggaaacacgactgtggtctaaagtagttgatgtctcagatatccagaaatggcgttagtgatattcaggagctgtccattgaccctttgattcattgttgcagtttactgaaagttgttagctggtctcagaaaaacgaaaggaaaaaagggggaaaacaaaaacaaagaaacgtagattgtggtgttaaaatcaagaattccagagatttgtaccttctttatcagttgaattgtttacagtgtgaatcaagaagttagctcgaccttcttttcttgtgaatggtaagatttcgtgatcatcaatacttgattgtgctgtttgcaacttcaacggtaagatttcctgatcttacagtttaattgcttgtgctgtttgccactt

SEQ ID NO: 5 - DNA, 1572 bp, synthetic construct
  misc_feature 1..1572: note = d209 mutation Beta vulgaris PPO2
  source 1..1572: mol_type = other DNA
atggtaatgctatacgattctcacctctcaggagtctcaactcatcttcaactatcgcaggcatttcccaggaagaacccattaatggccaaagtgtctgagccgggtaaacccacttctgctaaaaggattgctgttgttggtgctggtgttagtggacttgctgccgcatataagctaaagtcccatggcttgagtgtgacattgtttgaagctgatactagagctggaggaaaactcaaaactgttgcaaaggatggtttgatttgggatgagggggcaaatactatgatagagagtgaagcggaggtcacgagtttactcgatgatcttgggcttcgtgagaagcagcagtttccaattgcacaaaacaaaagatacattgcgagagacggtcgtcctgtgctgataccttcgagtcccattgcacttctcaagagcaatatcctttcagcgcaatctaagctacaacttatgttggagccattcctttggagaaaacgctatgcttctaagatttctgatgagcatgctcaggaaagtgtgggtgagttttttgagcgacattttgggaaagagtttgttgattatctaattgatccttttgtcgcgggtacaagtggagatcctcagtctctttctatgcgtcatgcatttccagaagtatggaatattgagaacaagtttggctcactaatttccggattaattcaatctaaactgtctccaaagaaggaaaagggtggaggaggaaagccttcttctaatgaaaagacacgcatacgtggttcgttttctttccagggtggaatgcagacacttgttgacacaatatgcaatcagtttggtaaagatgaactcaaactacagtgcaaggtcctttcattgtcctacagtcataaggggatcccttcttcagaaaattgggtcgtgtcttctgtgtcaaaaaattccattgaagatcaacaatatgatgctgtcatcgttaccgctccaatcagcaatattaaagaactgaagattctgaaagctggagttccattttcacttgacttcattccagaggtgagttacctgcccctctctgttatgattactgcgtttaagaagaccagcgttacaagacctcttgagggcttcggagttcttatcccttcgaatgagcaacataatggactgaagactctcggtactctgttttcatctatgatgtttccagatcgtgctttctccgatatgtatctctatactacctttgttggaggaagcagaaatagagaacttgcaaaagcttcaacggatgaattggagcaaatagtttcgtctgatctccaccagctgttgggcactgagggaaaacctacttttgtgaatcatttttactggaacaatgcattccctttatatgggcacaattacgactcagttctgagagcaatagaaaagatggaaagagatcttcctggacttttttacgcaggtaaccataaagatggactctctgtgggaagaactatttcctctggatacaaagctgcggagcttgtgatatcctatctcaactctacttaa

SEQ ID NO: 6 - protein, 523 aa, synthetic construct
  REGION 1..523: note = dG208 or dG209 mutant protein of Beta vulgaris PPO2
MVMLYDSHLSGVSTHLQLSQAFPRKNPLMAKVSEPGKPTSAKRIAVVGAGVSGLAAAYKLKSHGLSVTLFEADTRAGGKLKTVAKDGLIWDEGANTMIESEAEVTSLLDDLGLREKQQFPIAQNKRYIARDGRPVLIPSSPIALLKSNILSAQSKLQLMLEPFLWRKRYASKISDEHAQESVGEFFERHFGKEFVDYLIDPFVAGTSGDPQSLSMRHAFPEVWNIENKFGSLISGLIQSKLSPKKEKGGGGKPSSNEKTRIRGSFSFQGGMQTLVDTICNQFGKDELKLQCKVLSLSYSHKGIPSSENWVVSSVSKNSIEDQQYDAVIVTAPISNIKELKILKAGVPFSLDFIPEVSYLPLSVMITAFKKTSVTRPLEGFGVLIPSNEQHNGLKTLGTLFSSMMFPDRAFSDMYLYTTFVGGSRNRELAKASTDELEQIVSSDLHQLLGTEGKPTFVNHFYWNNAFPLYGHNYDSVLRAIEKMERDLPGLFYAGNHKDGLSVGRTISSGYKAAELVISYLNST

SEQ ID NO: 7 - DNA, 37009 bp, synthetic construct
  misc_feature 1..37009: note = R126A mutated Beta vulgaris PPO2
  variation 3684: note = n is any nucleotide
  source 1..37009: mol_type = other DNA
tattccatcgaatgtagcaaattgactgtccgttgcaatttcggagtttccactcgtcgcatggtaaatggtaatgctatacgattctcacctctcaggagtctcaactcatcttcaactatcgcaggcatttcccaggaagaacccattaatggccaaagtgtctgagccgggtaaacccagtaagtcaaacattcgaatcacaactcaagcaaatttgtcttgtttgcgttatattttgctcatttcagccttttttgtttttccgacctttgcatactgaatattgtgtgtgtgtgtgtgtggggtttcagcttctgctaaaaggattgctgttgttggtgctggtgttaggtaaattttcgtctcttgcagagtttttgagtcatttgggaattctatgtgaaacttgtaactcccttcagtccaacgaacgcagtacaattttctatcaaatcatggtcctaatttccaattttccatatatattgttggaattatattgggattgtctatcactattaatagtattaggatcaattgtagagaagcacagaaatttttgggatcgaaagaatatctggattgccacattaacagcagatataattcttccaattggtttttggttcttcctaccttgacttgtctggtcaaacattataaactttaacctttaatatccattaaagtaaactataggatttttttgtctaaaacatgcttatataacatgaaatttgtgagaaaccaccttatatatatttttttgcgaaaacaaaccttaaacaaaattattatcgtgagaacaaaccttatgccaatttcgatcattgacccaaggttttggcattgaccgtgtcatgaattttgttgggtttaaaaagtcatgtgtcttgcatacgaaatggtaaatgcgggaaccttgggtcaatgtttggaatccgcataaggtttgttctcccaaaaaatgtttttgttcaaggtttgtttttgcaaaaaaacttatataaggtgctttctcagaaatttcatgttttataaagtagtatttgacaaaaaaccctaaaatatattatagaattattattgactaaattgtgtaaaaatgtactcttctaaaagtacattatagtattttagtggaacatttgcgagaaactactttataaatacgatttttgcgagaaatttcctaataaaaaaatgtgaagtgcaaaactatcttattgataattttctactccctcaaatccaaaatactatgaagtctttcctttctggtttgtcccagattagtttgtacgcttccatctttggtatgatcccacttttattatacttattagttttacgtgagttccttactctatctcttttaacaaaaatactcaactatctctatccaataaaaagttccttactagtcctatcacatctgctttttaataaaataacgtttgataaccacacaacttatatccttaaaatacacgttcaaccaagtgttgagattaatttggacggagggaataaatattttttgaggcatattggtagcagtattcggattccgataggttgactatgtttccaatgttgaccaacacttgccttgcatgtaattctaactttgctcttttttattcttcatttccctcgtattccatatacaatgtttagagacccattccttcctcttctcttctttcccttccttactatgctttgccataatcttcctcaaatgagtgcaaattaatttgtcgttgatgtaggccaactgattgtagcacatcttcatagttcatacctcaacacactcgtaattatattataccctacatgttaaatggctcatgaagctttattttatatcatacttcctccgtttcacaataagtgtaacacttttcttatttggaataatcacaataagtgaaaccaagctccaaatggtaagaaaagttcactcttattacaaatataccaccaaaaagtaagaggggatcacaacttcaatacttcttcactctactttattgtggtcccaactttctctctctaaattccttggtaactccccactttctctatgtttcacttatggtgaaatggaggaagtattttgtagtggtatttagctactaggccttggatgatatacaatcatacaatgtatttatattcacgataatttgctgcccaccttgattaccatgatttccaccaattttatcaatttcagtacttcaccaccccgaatttatattttttatttccaaccttggtatctccatttgtctgagtgcccgatccatttgtatcgcctccagaattgaagaagcttcctgcagctagacaattaggaaggttaaaaaagtttggagatggtggaggatagccataataatcattgttgggaggtggaacttggaaggttattgtagggttgaagtccttgatgaagaagaattgagttcaaatgagaggaaaaaggagcagggaagagggacaataagaaaaaaaagggtaaactaaaatcacgtgtaaggcatgtgcagatcaacatcagaaagcatagtcaacctactggtattagggcactgatacctttttgggtcaaaatttttttacaaggtatttcatgaggtagttttgtccatttttttttttacaaggtatcgtctcattttttttttatcatttagtttctcgcaataagtgtatttcatgaggtagttttttccaaaatttcctcatttattataaaatacctcatcttttccataaataatgcaatgtctagacttttacgctgtttacacatgctcctttgaccatctattgacacacaaggaaaaatagagtagagtcatgcaggatcttgttagatttttctcgatatatactttcaaaagatcaatttttttataattttttttttgaggggattttttttttataattatgtacttatcaaaggtcaaagttgtgcaccgggaagcataaaactctatgtgttgcaatttacatggaaggggaggagtataataagagaaaattatggtaaaaggttcattcctggagatcatgagaaaggaagtagaaagaacaaaaaagaacaatgggagtgcttttcaatgtttgttgtacgtagcatttattcatttgctataatgttttgtgacattgtagtggacttgctgccgcatataagctaaagtcccatggcttgagtgtgacattgtttgaagctgatactagagctggaggaaaactcaaaactgttgcaaaggatggtttgatttgggatgagggggcaaatactatggtaatgtttttgattattgcaggtcttgcactttagcgcacaattaatttctggatttttttttgtactgtggtggttatggtcatcaacatgtctcacccactgtgcttgcagatagagagtgaagcggaggtcacgagtttactcgatgatcttgggcttcgtgagaagcagcagtttgtaagtctttcattatctgaatggcacatactttatttcgaaagattgtaattgccttttctttctagatggcttcatcttcatgttgctttctgattcagtttcgtggctaactttccaagtttgtctgattgctaactctgtcatagccaattgcacaaaacaaagcntacattgcgagagacggtcgtcctgtgctggtaagtttgcttgttttacttttgacctcttttaagatctttcaactctggagcctggaaacatggtgatgcaggaggcaagttctctctattttacatcctttcttctctgtatcttatgacatttgcctcttattctgtgcagataccttcgagtcccattgcacttctcaagagcaatatcctttcagcgcaatctaaggtcgttttatgttaagacatacttgatgctgagagtttattgaattcttaaccttcttcttattttttttttatttttttagcaaaaggtaagtatattgcatttaccaaaaaacagtatgtacaccaccacagcagccatgtcagaatctagaaataccaccgaaaaaatcctacacccaaccagagacagttatattatatcctactcctaagtttctgtacccaatttacatcaatattggtccatttacaagatatttttataattcacagaagcacatcagttttaattagtttaataatgacctctggatgaataaccaactcagaccatatagccttattcctggctttccggaagttgtacgccagagcagcaagcacagcaatgcaaacctgtttcttatacctccttttatgtgtcttagcccatctcttatagctagtgaagatacagtcgtgtgcacaggattgaaccccaatccaactagcgaaagcctcacaacattatgactataaatacatctgaagtataaatgctgcacctttttctcctcttgcctgcacggtatcagaacaaatcccagctttagctaacaattccctggttttcagtttattcaatgccatcatgcaagcaatgaaagaatgttttggaacattcagtttgttccaaacacagtgagagcaagggacctttcctgcagttccacttagccacttatatccctgactaatagtatgactctttgcaccgtaaattgatttcaacttaactttttcataagcagtgaattgtgtgttgttagagtgtctagctgtctaggagattgggagaaaaggagggaccaaggagatagaaacacacctttgtgtttctttgtgtatttactttttagggtgggtcacgttttctgagaaatttgggaaaaggaagaaatagtaacacactttcccatttgtataacctgtatactggagctccaatataatttgcatttttttttgagctgcaagaatatgttgacaaacagttattgcttcttcctcagctacaacttatgttggagccattcctttggagaaaacgctatgcttctaagatttctgatgagcatgctcaggaaaggtaatgtcaagacatgtgttacctcgccttaattttcgttccaggaggtgagcatgcatttagaactaaaaggcacaaagactgttggtggtcttgcctgttcaaatataatggagaggagttttcgctacatttaccctctcttgaagtggggttgaaatatagcatcaagttgaatgcttgattaagtttaaaggacttgtgtaactctttttctgtttactgtgattacatgacctggttgattaacataatggtctgtttatctgtagtgtgggtgagttttttgagcgacattttgggaaagaggtaatggtttaccatagtatttctgctttagtggtaaattgtaatgttgctgataattatacttcgctgcagtttgttgattatctaattgatccttttgtcgcgggtacaagtggaggagatcctcagtctctttctgtaagtgaacattttgtgcttcactcccaattttttggaggctggaaatagattcttttccagttgttctgtcaaaaatagatgtagctttattttgaatttgaagttcccaattgttcattttgactattactgattattgctaagagtggcattatgctattatgctcctaaaagaaaggtgaattttgacctacatatagtataatgtatcaatattggtttaattgtttgttcttttgttccttttggtgctcatcttgcgccttgttctcatcgctcgttttttcatgttgcacttgatttaaatttgctcagcttaacttgtctttttgaatttatattacttattgctatattttactaatttcgttgaaactaattttttgctgaacttttcgttttgttgaaatcatttttctgaattaacttgattttcctgaatagaattgaattttggtgatcttaccttttctgcagccttttatttctttcttgtcctttttccaatctcatttttttatatttccattgtgttgacatcttatcattaactgtgcagatgcgtcatgcatttccagaagtatggaatattgagaacaagtatggaccataagacgtttattttaatcgacatgtatgtttcttagtttatacatatattaattctgtggtaaaaaaaccgaacaagaatatctttttttttttctatcatcaaaaagggtgaatatatgtagaggaaaaagatttgaatcaagatattagcctaaagcaataataatgttagtaatagctttaataacaaattcaaaacgtacattaatgaaccgagaggccggaaaatagttaaagtgaccactaagagaagcgaaggattcatgatgggttttcaacccagtagggcaaatttgttcaatgttctttacaaatcaagcttattaccttgtgggtgtttttgctagagatgaatgatagaattttccctagttggaagtcttttttggttactttatgggagctagtgatgtaatttgtttcgccttatggcatttcctaacatgtgcttttgtgatgtattgaagctttttttttgccttaatttatgctggattttaattttgttctttgtttcatttttcttgcttttgaaaaaaatatatagatatgtatatattaggattggtcgaggattttgagggaagggaaagacctaagaaaacttggatgagggtgattgatagtgatatgagtctatttgggatcgaagaaaatattcctttggataaggtgtagtggagggttgagggagcaaatttatgcagattagcttgacttaaagtttttctttttgattatttttcatttacttgtgttttgcaaacatttactcatgaatgatgtaaacttcttcaaccaaatctctggaaaaaaataatctacatggaaaaaacattattaatgttaacttgacagagatcccatccttgtgaagcagctagcaattaggcatctaacaattgacattttaatggacaggatagaatgtctcttgatagtcaataccctctgtttcattgtatcccatagctactaatctagtttgtatctttccaaagaaccattattttgaagtttcaccttgaacacccattttgaaccaatatgtttcttgcccttggggagaggggctaattgccatgttttgatgcggatgcaaagacacttgttctacctgagcctattgacttgatcatggatactctagggtttgaactcaagggaaagaatcaagtcttggcatgtgtggtgacatggcgtggggatggagtaaagaagagtcatagttctgttaggatatgttcttgcttgctacatagaatcgtagttctgttaggattgctatgatattatatctagtagatagattttatagttaattaggataaacatgtgatgatcatgttataataggcatgtgattagaggataggattagcttaattcttatcttgttgttagtttaattcttatcctagttttatgtttatcttagtcgaagttgtagccatataaagggcgttccattcattaataatacttagttttgctttgtgttttaaacatacttcttgattattgtttgcttgtgagctaactaatcaaaccattaaagacttttcaggagttttagtgctaaacatcttaatttcaggagtgattttaagagcgtttagtgatcttgaatcaagaaatatccttgttcttgttcgactaatatcagtggttttgttcgagttcttggagttaatctcttcaagattcttattcaacttgattgttgagcttattggtttagtaatcatatcaagtggtatcagttttccagggaggagaggatagataggattctctttgatcaacaaagatccaagggctatcaacaaggttcaaacattgctgcttgttcaagacttgatctttttctaccaagatgcattctttacgtcacaaggtagtaataacaagattaagagtggtttttacatccaagaatcaatctttcacgtccaagatttcatctttcacgtctaagattcattctttaagatcaagaaagttataacaagcatagaagaacacataaccatggagtccgagatggacaagcttgccaaagctatgcaagcacttgcaaagtcgcaaactgaatcacagagtcgactcaatgagaatactaccacaatcaatgggattggtagtaacatgaataggttggaggcacgcatggatgccattgcaaccatcatacaaaagaagcttgatcggaatagtgccaacttcataggtgccaattcagaggaagagttggcagaacgtgaagaaagatcatccaagactacatacaatgatgatcgtggcttaaagttggatgactataatggagatagcaatcgagaagacttgttacagtggattcgacaacttgagaaggtatgtgattatagaggctttgatgacaagaaaagattcaggattgcctccataagactcacgaaatatgctggaatttggcttgaaagcttcaaggcacaacgagccaagaaaggtaaagaaaagttgtgtagttggacaaagttgaaagttcaagcttaaagagaagttcttgcctagtgactatgaacaaaaatagttcataagactctctactataagccaagacacgcttagtgtacatgagtacaccatggaatttgacaagctagggcttatatttgacatagaggagaaagaacaatggaagattgcaagatacatcaaaggcttgaaccgccacattgccaagaaggtggaagtatccacttatcacacctttgaggatgtgacaaagttggctaagaagtttgaagaacatgagaaggaagagaagcctaagagttcttacacgcctaagtatgatactaatgctaaggccaaggctagcttcctactcaaagtggtatgaaggacctaagaggctaagaacctcaccccacctaaagaagacacaagagttgagaagcctaaagtcgtcgttccaaaggagaaatttgaagagatgagaaagtgcttcaagtgtcaaggaaggagacacatagcaagcaattgtcctaacaaaagagtcctcaccatgagacaatacctagctttgcaagaagaggaggatgtctattagttcgtccctgatgaagagcaaacttaggggaagaagaggaggaggatgcttttgctgaggatgatgcaaggctagtaggggtcaagaggcgcaccttacatgtcgaccatacacctagcatggagcaaatggaaaaatcttttccacactagatgcaaggtaggtgactatatatgtaatggtataatagatagtggttcttgcactaatgttattgtatctgaggtagtgtcaaagctaaacttagctacaagggcacaccctaagccatacaagttgagtttgctagatgatagcactggcatgagagtaaagaaacaagctttgatttcattctctataggggttataaggatgagttatggggtgatgtattgcctatgagtgcatgtcatctcttgcttggaagaccattgcagtttgataaaaaggtcatccatgagggggactctaatgtgtactctgtgttggttggttctaagagggtatgtttgcatcccttagctcctcattcagtggcgccaaagcaaccacctaagacaccaagttactttctatcttcaagggagttcgaacaagaggtggaggaagaaggttgtgcttatgccttgattgtaagacatgctgccacaagtgtcaagactactagcaatgagaagctcgaagccttgatgaaagagtttgaggatgtctttctagaggaactacgacccttgagaggcatagaacatgctgtagaccttgtacctggcgcccctttgcctaacaagcctgcttataagtgtgatccagtggcatctagggaattgcaacgccaaattgaggacctaattgaaaagggctatttaagggagatcatgagtccatgtgttgtgccagctttactagttcctaagaaagatgacacatggaggatgtgcatagatagtagagcagtgaacaacattacagtcaagtaaaggtttcctatgcctagattggaagatatgttggataagttacatggggcatcaatcttttctaagattgatcttcgaagtggctaccaccaaatgaggatcagagaaggtgatgagtggaaaacaacattcaagaccaagcagggattgtatgagtggatggtgatgccatttgccttatgcaatgcgccaagctctttcatgagcttgatgaatgaggtacttcgtccgttccttaacaagtttgtggttgtttacatagatgatatacatatctatagccaaaatgtggaggaacacttgttgaacttgcgtagcttattcatgaagcttagagagcaccaactctatggtaagattgatggcgacgaggttgacgggggattatggcggcagtgaatcaccctctttgccggtcactgaaatacaacctgaggtatctttaaattctgtaattggattgactaacccaaaaactatgaaattgctgggaaaaattgctggatgtgaagttgtggtgatgattgaccctggggcaacccataattttttatcactagctactgttgagaaattagctattcctgtgtcggaatcggaaggatttggggtttctctaggggatggacaggcggtgaggggtagtggaatttgtagaggggtgttattgagtttaaatggtggagttgaagtggaaacagattttcagcctctgggtcttggtaattcggacgtgattttgggtgtacagtggctggagacgttggggacagtggagagcaattggaaaacacaaacaatggggtttgaaatcgagggtgtcaagttcactttgaaggtgacccatcactggcgaggtctcgaatctcactcaaagccatgatacgtaccttatgtaaagagggtggaggtttgtggcttgagttgaaccagattgagcattatcaggagaaaacaccgcattcatcagccttacctgaaattccagttttcttacagagagtccttacccaatttcagtctgtgtttgctacaccagaaggcttaccaccgataagagaacatgaacatgcaatagttcttagagaagggtgtaatccggtaggggtaataccgtaccgttatccacagttccaaaaagatgagatagagcgcctcatcaaagaaatgttggcttccggaatcatcaatccttccacgagccctttctcgagcccggtgatattagtgaagaagaaagatgggtcgtggcggttttgtgtagactatcgggccctcaataaagaaacggtccccgataagtatcccattcccgtgattgatgaattgttggatgagcttcatggggcaacacttttttcaaaactcgacttaagggccgggtatcaccagatccgggttaaggccgaagacactctcaaaacagcttttcgcactcatgaggggcattacgagtttttagtaatgccatttgggttgacaaacgcgccggcaacgtttcaatcccttatgaacgaggtcttcaaaccattcttgcgcaagtttgtcttggtatttttcgacgatatattggtctacagtagttctgccaggaacatgaggagcatttgaccttggtgttgcacaccctagcagctcataaattgtttgtgaatcagaagaaatgtgattttggcaggtcggaagtagcatatatggggcatatcatctctggtcaaggggtggctgtggatatggagaaggttcaagcgatggtggaatggccccttcctaaaaacctccgggaattacggggatttttgggccttacagggtactaccgcaaattcgtacttcactatgctcatatagccaagcctttaactgatcaactcaagagagatgcgtttgggtggtctgaggcagcaactcaagcctttgaaaagctcaagaaggcgatgatcacatcccctgttttggcaatgccggacttccaagagttgtttgtggttgagaccgacgcatccgggtatggtctgggggcagtgttaatgcaaaacaaccgacccattgccttttacagtaagttgttaggtgcccgggctcaattaaagtcgatctacgaaatggagttgatggccatctgcatggcagttcagaattggagatattatctgctgggtcgacatttcctcattcgtacagaccaacagagtttacgtcatctcactcagcagcgagaagtaagtactgccttccaacgttggatgagtaaacttatggggttcgattttgaaatacagtttaagccggggtgtgccaaccgggtagctgatgcattatcccgcaagacagtgggagaggttgaattgggtgcgctgatattaactcatggggtggactggaccgacttggagcgtgaaattgaaggcgatcctctgttgtgcaaaattaaacaagacttccacgggggtgctattactcctgtgcacttttctttggtggacaacaagctgttgttcaagggtcgatacgtgattcccagctcttcggtttttattcctaccttgctgcgagaatatcacgattctcccattggagggcattcgggggacctcaaaacatatctcaggatggctgccgactggtattggaggggcatgcgcaaggatgtggcgcggtatgtgcaacattgtagcgtgtgtcaacaacaaaaaatgtctcaacagatgccagggggggtactacaaccactccccataccttcctcggtttgggatgacttgtcaatggacttcgtggaaggcttgccatcttccaagggggtaaacaccatcctcgtggtggtcgatcgtttgtctaagtacgcccacttcctcccactacgtcatccatttactgctgtgtcggtggcaaatgtgtttgtcaaagaggtggttcgtttgcatgggtttccttcctccattgtttcagatcgggatcgaatttttatgagtgtgttttggcgggaattatttcgtttacatgacaccacactcaaacgaagtaccgcgtatcatcctcaaacggatggtcagtccgaaatcgtcaatcgagctctggagacttatttgcgttgctttgtgggggaatacccgcgctcttgggctcagtggcttgggccgaattttcatataatacttctcctcatctctctaccaaaatgaccccgtcaaggtcctttatggtagagaccctcctactgtgatacgggttaatcggggagcctcacctgttgaaagcttggaaaacatgctccaagagcgagacgcagtattagatgccttgcagattaatctgattaaagctcaacagaaaatgaagagtagtgctgatgctacaagaagagaggtgcattttaaggtgggagatcgagtgtacttaaaattacagccttaccgtcagaaatctttggcttaacgcccttatgagaagttagccgcccgtttctacggaccatttactattttacagaagattgggcaagctgcatacaagttacaacttcctgtttctagcaaggtgcatccggtgtttcatgtctcccaactgaaacaggccgttggttccattcccgtttcagccactattccagagcaattgtcttctgacttggagttagaggtggaacctgatgaactcctcgatgttcgtagtgtttctagaggccagcacacttacttggaagctctcattcagtggcagggattaccatcattcgaagctacctgggaagatgtggctgctttccatcaccattttccatccttccaccttgaggacaaggtgaaactttgggggggtggtaatgtgatgcaccaaactaccactccactactcacctattagaggcgtaagaaaaagggggtaaatcaggaatagtttacaaattctgttgaaaggaatattttgtaattatgatgtcagaggttgttagcaaaaaggcagtagagtaacaataaaaaggggaagggaggagagaagaaggtattgagatttttgtaaggaacttggcccttgggagagttgggagcctctcgaaagctcaccattatcttgtgaatattttccttcctggttatatacaagaaccttcctctgtcaatttcttttctctctaatcttatttcttattctgttttctggttgccattgtttgaagttgcttgttgtgcttgagtaaatacgtgaagtggtgaaacccatctgaattcatcacatctattccaagtggtataatacaagcttgtaatccaaatctaatgagaaatctaagttatgaagaatttcaaaagaactaagtacccttgttttggatgcccaaggatttacttgccgctcaagttaatgctcaacgtgcaagatacaacctctttagtatcccaaggtagtttccataagaattaattgagctcaaatcaagaacaatatttttatgtattaatgtgaacacttcctgaattatattagatatatggtctgaaggttggaagaaagattagcttttaattttaagtttgagatagtttttagaatcgaggaaagattagctcttaacttgtaaactaaggattgctttataagtaaaacattagttatggaactcttaaaattggttttgaacatttctagttaaaaatcccatgtaattctcccaaactagcttaaaatctcacatttcacaagctaaggagagacaaatggcgttctcttgtgaaacaatctaaaattttcattaggctactgttttcaagtatttatatgttagaagtgccgcatataggtacataaaataagtttacaaacacaagtaggaataaggaaaactaaaagagaaacttcagccatacaaaaccggctgaaatcagctactactttctactttctagcttcaaaatctgattgcaagtctcctttaagccaatcaccaatgaaaacctttcctccacatgaagtgtgctcaaatcaagagaagaaacccatcattcgcctatagctacctgggtcagatgaagatacggcaaaaaaaacgctggaaatcagtgaaccaaaataagcaccaattggatgctttctgtccttgctacattttcttctcataggactacttcaagccatacatgaataagcagttagatccagctcctagcatccatttgatcgtacaaatgagctccaaaaagataagtaaaaccaagcagccaaaacctaattaatactaatgatgaattagttgaatagctaatgacgatgaagcaacactttagtaggaatagtgttaattatgatcaatgctacttaatcttctgattaatttttggaaaaatgtcatatctaccttctgtatacacttattcataactatatcgtattattattatttttaaataactaccttttaagtaccaaaacctaagaaatcaggcacttgatggattccatccaaagatccatttggcggggcccactaactgacttttgattttttgcctttcctcttttggttaatctcaatggttcatcaataacaactcaatcttctccccatttcatcaaatcatccctaaatcagaactttttcaaattcacccaaatgaggttatggaaacctctaccaagtttattcgaccacttttagtctagctcaaagttttacacttgcttcaaaaactaagatttattaactttagaaattaggtttttatttttattttttatttaactttgtaacaatcttaaataactcaggtgctttctagagtttggctttaattgtttttcccttggttatgtgaaagaagtatgactactttctccaagactaaagtagagagcaaaaaatgcaattctggaatttcttgcaaaagaaaaggaacgagttaatgataatgaaaaacaaagaaaatgatgagaagagaggagctgaatcaatcatgatcatgtattttaaagttttttttgctattgaagtgacttaagaagaggaaagaggatgagtgaagacaaacaaaagaaaggataaatagagggaaatcttgggcttagaaaggtgaaaaggtaagaagatgagttagtgggccccaacaaatgtatctttggatataatccgtcatgccactgtttggggcttgcttaagtccatacattacttcactaattttacaaaatttattttcttgaccaagaactgaaaaaaccttcagtggtgatctattaggttttggaagttaaaaggtagttatttaaatgtttttaatataaaaggtagttatttagatatttttaatataaaaggtagttatgtgaataaaagtgtatataaaatgtaattttttgacatttttgccttagtttttcttgctaattcaccttttcaacttgaccaagttgctatgaggagaaaacgagcaattattaagcaaatcgcaacactagcattaatccatggcccatgaaactctccataattagagattggattagcacttagtagaacttcttgctcctgctccaggtttccattacttctttatctaagtgcatcaaaaggttgttgggttatgaaaggtggtggttgtgtatagtcattgtcaaaatgttgttaatgcactctatttagaggatgagggattgaatagttttcacctcgtgacctttcattcctttttaaaaaaattgataatgtgtattggtcctatgactgtatgaatggtaataagctatctcatgagctgttactatcttcctcagagtctaggtagaagggtttgggctgataattttctactatgtgcaattagtttgttggatttggatatgctagttgatataggtcctttcccttgggccttctcttaatataggcctacagtgtgattgaagataaatcttctggagaatataagaacaatgagatggattggttagaggttgatttgttcttttggtgtaagactatttcgggttctctattggttatgttcagacgccagaatatgtgttggtgattgttttccatgaacatactttatccgcagagacatttttcttttttcttcctataagattatatttgtttcctctcttggtgctcatctcagtgtctctactttacgttaaactgttgacattacttgacaatgcgtatatttgtcgcatggtgctcttccctcactccacgtcgaccccatacatcaaaaaatgccattaaagaatattcgaactcacaaccttgtgttgaaagaatggaatccctaccaatgactcattaattcattttctctttaagaaataaatgatttcctcacaaacttttaggctttaagagcccaaaagataaaaacataaaataagatagacatcaacgtcaagattagccttaaatgcacaaagcacatgtcaaatgattgataactactcacgagttgcaactctttgggcgttgcctaatattaattggatctcttttaaaaattgttggtggttatggttggtggagaggaccatgtaacttttagctggtcacaactggtaatgattgtcacttttactgcccataaaaaaatttaaactgttgaatatgtttctggcagtggatctgacaaatcctttacaagttggcgtccattttgttttgccatgtgactcaattataatacgtgagttttattatccaccaggtttggctcactaatttccggattaattcaatctaaactgtctccaaagaaggaaaagggtggaggaggaaagccttcttctaatgaaaagacacgcatacgtggttcgttttctttccagggtggaatgcaggtattagcatgtagctttcattctgttaacatttgtggttcttccagacatacatccaatgctttttttttttcttgctataaccataaacattcttgtcatgaacattctttaatactgttgctgagcttagtgtattcgttcattcatgtaatttcctctcttgaggttaaaatggcatacagccttacaacctatatccataatgctccttagagtagaatccctaggttataacatagtaccacttatcaaaataaacatggcacacactgcaggacaagaagtaaatccacctagagaactgagcacctagtagtaaaagcagcgatacattactaataacagtagcagggccataagagtagtaaatgggcctcatttcaacactccccccgtaatggtgagagagaagaagcagtctgaactcccagcttggagagcaaaatagagtgttgctgaacagggagaaccttagtgaaaacatctggcacttgatcttgagatggaacataggtaggctgaataaccccttcttcatttgtattgtccctcaggaaatgacaatctatgtctacatgcttggttttctcatgatgaactagatatgctgctatggcaagagcagcttggttatcacagtagataggagtagcactggactttttaatgcgaagatctttgaggagttgtttgatccacatcacctcacacacagcaagagccatggatctgtactctgcactgaccacaagaaattgcctctttgactttcaagatacggggggagtcaccaaggagcacacaaaaccagatgtagaatttacaacacccatcccattcactatcacaaaatgctgttagttgagcactagacttgttcgccatgagaattcaccctgttggcagcttgaagatgcacattagtggggcagtgcataaatttgcttaaatcatgtatagtgaaggcaatatcaggcattgccttgtaatagtgagataaatgagcttccccatcaatttttgatacacatcaggttgttgaagaggatcaccattgtcagcatagagcttgacatgtgagtccatacgaagcctcaatcgtctgcaatttataaaaccatattcatcaacaagacccatcacatacttctttagagataaaaacgatacttcactacactgatccacttcaatcctcaaaaaatatcttaggccacccatatctttcatgtgaaattggccagcgaagaaactctttgcttcctcaatagttgctaaactattgccagcaagaatgaggtcgtccacatacaccaatatagcactgaaacagtgagagttttgcttgaagaatagagagtagtcacacttggattaagtgaatacattttgctttaaagcagtgttagcttggcaaaccattgcctcaaagcctacttcaagccataaagtgacttaagcagcttgcacaccttagttcatttggtgtcacttctgccatcagtacttagctccccctctccttgaactttgatcctgttacatgtttcactatatcctggtgatagcttcatgtatacactatcctacaattcaccatgcaaaaaagcatttttaacatccatttgtttgcaagaaccaaccctctaaggatgcaacaacaagcatgtggtcatctttgctacaggggtaaaagtctgctcataatctattccatatctctgtctgtcacccatgattacaagccttggcttatgcctattatttgtgccatcagtgctgtattttgttctgatccatccatgtgagggatggctcatttctacaaaatcctagttccgttaggatttgtgttgttttcctaattctagtaggaataggactcctaaaatcctaatcctcctagttctgttaggagtttaaaagttttagtttgattgtaattctagttgtgttagaaatccaaatcctagattcatgtcacgtatggttagaacatggctagtaggataatttgtcttgtgatgtccatagccttggcatttgtggcacctaactttcaatagcttgtcttctgtctccttttctttctccttctttgaggaatcaacgtttttagagctatctaaaccactagcatcaatattaggtttaaaagtgctaaaagatttcgaatagttcttacttgcatacaatttctttttctagtttatgtagcgtcaccagggaacaaaaactcggccgttccgttctggaacggccgctttgtaacggatttcagagaggccgttccgttaaataccgttctagaacggtgatttggaattcacaccaaactcggcgcgatagcgttacgtaacggtgtaacggcgttccagaaccgttacaatcacataacgtccgttatttgaagaagaccagttcttttggtggaggaagaagaagagccaacgcaagatctatagatctgagttaaaatttgaaaataaaacatgtttttttatttaaattaaagcttacagaggatgtagaactcaaattcgagtaaacccctcctttaatttcattaggttactgcaaatcgaaccctaaattgcaaaccctaatttcgaaaaaaccctaatatgcattgggatgcaacgctgcttctccggtcatggcagagaaggtcgacgagtcatcttcggctgcttttagcactgtagctgccggtggttggcttgtttgcaggttagtgcttgctggttttctttctctcataccgatcatcttcttcttttctctcttctctttttcttttttattgtgtgactgccagtcacgtgataattgcaactcataaagtatctctttctctctcttcttttcatccctttttatttttctttcccttttagtttttattccctcacgtggaatcacctaattttcatccttttttatttttttagttacactcttacacagaagtatgttcaaatatcattatagtacctcaaatattgtatttataagagttttggacataatatgatatagaaagtaaaatagaagaaaaataaagtttaaatgtcacttgtgtgatttttttaaaaaaattcacgccgcgacggccgcgaaacgttctatttcccgttacaagccgttcccgcgataacgcgaccgttcccgcgaacgcgaccgcgaccgcgttttttttccttgagcgtcacatcttgcaagcttcttcaaaggtgagttatgtgtacaactccaatttctctccaatcccctccgtcctcatttaggcctccaaggaagctacttaaacattgatcttcaagttcatcaattttccaaagaatggataacttctcgaactcctttatgtaatcttcaacggacatattcccttgtttaagagtagaccattccatgtacaagctttgtttgtagttagaaggaacaaaacgtcctcttaacaactttttaagcttatcccaagtagagattttgggtttattagctttcacacgctgcctctttactccatccaaccaaatagatgcatatttggttaccttaagcacggccaccttgtatttcttttcttttggtgtctcttaatcccaagtagagcttttgcgtgtgaaagctaataaacacaaaatctctacttgggataatcttcttcttgtttccgaaacaactaattcttatggtagttaggaaagcaagaatggtttctaattcaatagggaatatattaattattattagtttaagttaaatagtgcacgaatctaaatagattattcgtctcaaaatctcacttaagtatagatttgtttggacatctgagggaagaagaagagagcgagataaaggagaattatcactcaatgaatccatatcccgagttttcccatttacttctttgaaagcaatatagttcacgaggtcttattatcagtctatggacataagagtaataatttaagggcaaaaactatgactttatgggtttaaactgatacatgttctgttaaactgatagatgttctgtgttaaaccgatactcatatattcctggttaaactgatagatatatgatttaaattgatacccgtctcagtcatgtcttggattgagacggtctgacacaagactttttgtgtattatatatctgattagaataaatttatcctgtttactaattattttatcttctccagacacttgttgacacaatatgcaatcagtttggtaaagatgaactcaaactacagtgcaaggtcctttcattgtcctacagtcataaggggatcccttcttcagaaaattgggtcgtgtcttctgtgtcaaaaaattccattgaagatcaacaatatgatgctgtcatcgttaccgtgagttttactttgcttactgctattgcaccaatctttcttcttttgacacactgataatggcaatgctgttgtggtttgaagccatgttatggggttttagggatatttatggagtctgatctaatatgttattggataaaattcagatctgtaacgtgactcaatgagattgaaaaaaattgaatcaagataatggattggaaaattaggagctaacctagggtctataagcgatccacttggagtctcataccaagcaggtattcgacattttaggtttatattgctgctatggctcatatgggagcctacatagggtctggtgcttattcctttttcttttgtctagttttggggctgcacatttctgttgtgttttgatatggatagccatcacctgcaattgcatggaggctgaactaagttctataggggagcaaacagtatctgttggaaatttattttcatattgtgtttttaaatgctataatccaaaatttgttgttcccctaaaatgcctaaaatacccttatgtaactgctccatctgtcccttaatagacttcccatttctccaatgcatgtttgccaatacacattttgtattgttaatatcaaaaattacatattagtaaaaattataaaagtttgattttcctaatgtacgcaatgagacgaatcaaacaagacgccatatgactatgttttttcttatacttcctatgttttttaataagtgacatgttttccttttagggaaatgtcacaataagtgacacatagctcaaagtagtaaaaatacttctcatttattacatctttgccattatttaattgtttcacctacctactttatccaatactcaaatttgattggttgaacaattggtcccaactttctctagactccttggtattccctttcccccactttctctctgtgtcacttattaaaaaatggaggacgtatattggaaaaaaattggaaggttttcttcacttatgaatagtggtaaaattagagatgggaaggctattttgggatggatggagtaatatttaaatttttaaaataatgtcattgttttagtgatgaaataaaattcaaggctattttttctagtaattatgttatctgtacatcaccacacgtatcgcgtgcatataagactagtttgatgatattccaacactgttcgaaggaagtcaggcatggaaccatgtttgcttccatatgggaaatattttgcttactctccttcaaacatctacctcattatcccagaatgattgatcgaatctaatacaaatatacaattgatcatatgccaccagggaattacatcaaattaaatttttatagaaggggaatcagtcatagcctcatagggaacgaataagtgatactcgccagtttctttcctggttacttttcctcttctcactagccatcctttatgtatgggtatgctgcatcattcctgccactggttgggactcccgtttgaactatggggggatgggaaagctaagccatcatcttcaaattgagtttcttgagaatgtaagacaccatctgtaagatgaatatagtgcactctatagtcaatgtcatgatctttatgggtttatctgctgaaataactgtgatatacccagctctccatttacaaagttttcctacatattaaactcttgcccgcaattctagaacttcattgtagaacttttcctacataagcatcatttgtcttttctgtagtaaaagttagaaagagctttattttagaacattcgtttttagttttctttgttgttgattactccgccacttttaatacttttatgattcaagtatttgacaaaatcatgtaatttaggtcctctgctgcatgcagtctataccctctctctctctctctctctctctctctctgtggttgtgtcttacttgttgagttactaactccagccattacataaagtaggctggcattatgatgagcaaattactcaagaccacatgttagctcctttttcttttctccttattctgaaaggcaaatataggtccatcttggtgcttctcatgtcataagtaagctgaccccctccttttccagggaataggacaataatccaaaagtgagggttttacatgttgggatttgtgaagtttcttattttacttaatagccgagtcagtgttacaatacatagtaccgtgttacaaaatagtatgtaacaccaagcatgtttatgtgcaaaattgtgcaagactttgttgctggcacgccaagggctgttttaatgtagtttacttattcttttaggtttttcagatgacaatcataaagggaattaggagtgtttttattgtagtcaatccctattgtgctacaacgataaaagaaaaaagcacaagactagaaggagaagtaatgtctaggaaagactcctcacctggggttgctagtcacctacacatcttagaaggcatcaaaccaaagcttattcccctcgactgttttcgggagaaaagaagacaaaattgtttctaacttatactttaccagtttcactacagcatcagaaagaagcaaaatatgctcccacaacacggcgaacctagctttccagatgtgataaaccagaccagcaaaatgattattttcactagagctttgagtctattttttcggtttttccccttcttcctggtaatgtcacgccaccaagccatcatctcaattttttgagatttgacgtaatcgctcaaatagctgagtaagacacttcttgctctaaatactaataaaaaagaggtgaatgtgggtctcagccatgttactcaaatcggataaagtgtctactcttattagggtttttgggtgttggactcatccatttttttttgtaaaatgtcaagattttggtttgaaatgagagattcaagtgtcgtgacatgagtcggcacgcaacacttaaacgtgtcgaagtaacagagggtctcagacaatcaactttaatcaatcacgaaccccaaaatttatgcaacctttgctcatattcagtctctgtaaagcactcaactgcagcacacccacccattcgcttcacctacagcaggagggcacccaagtaattgctatgatgagcgaattattctgttttgccttgctggaatattgctgttagatttgctgactcactggcagttaattatagtcagagaatgagaaatatcctgtagagagagaaagggtatcttttgtatttagctctataaatagctaaggaagggaagggcattgagagtttatgatattataataggagagatttagcctctcgaatgctgataggagcgtagctcttgttggattatcaatactactctgtttgctctatctatttctactcaggttccttcttgtacagtggatccctgattggatttacttcatcaaccagcagataaaattatttgtaggcacattgaaaccattccaaacctaatgaggccaaagtttatcacaaagaatataggagccaaatgtaggcaacagataagagtataattgccagaagttgaagactccaggtattgttcagaaaccttaatgcatatcatcattctgacactagattttccccggagccaactaacaaaaatgaattaaagagattaaggctatgtttagttcacctgaaattttctgatctgaacttatctgatctgatctgaacttattttttctgatctgatctgatctgatctgaaccaatctgattacaagatcttatcttttagatttttctcaatatataagaaaaaatatagtcatgtggggtcttgtttgattcgtctcaatgagtactttattaatattcaattattataatttttactaatatgtaatgaaagatataatgatttttaaatataagcatgatctgaactgatctgatgtgaacttattttttctgatctgatctgatctgattagatctgaaataagcaaaaataaggtgaactgaacatagcctaagcaacaattgagggaaaataagatcattatggctaagataagataaatatgtaatgataaaatcagagtaattatatcagttacactctcaacattcgtcagattgaggtttcctcccaaaatgccaacccacttttctgtattttcacgtccttctctctacccttctaggtatatattacatcagctgtaaaatttttgaaccaactagtagaatactgatctaccctcaactgcctcactttctcattttttctgggcctttttctctctagcacaagtccacataagtgatgcatagcagaaatataattccactagtcatcctcaatattgatataacaaacacatcacccacatattatcatttttaatcgctgcatgcgaggcatacttacccaccaatcaggatatgcataacagcgttcctaattccaaaaccaccatatatcttgggtttgcaactctcatccctagcaacaaggggactttctgaaaaagtggcagattccgcccacaagtagtttgtacggacacctttattatattattaatatcatatttcggcaacacaaattaccagcccagtaaaacatgaattgacatgagactaacaaggggcccaatctaatatcgtacgtctgtactaagcaatgtataaaaaaaagctcaaggtgcattgatgcaatagggatcctaatgtgcataggtgcgcctcattgaagtgaggcaccactaaggataaataaaaaagattgatgtaaaattaaattgtgcaccttgggtgcgcctcgatgaactttttttgtgtgcctaagtgtacctcaagtacgcctcattgatatcgcctcgcctggcagaaaacgagcttgaccccaatcgccttgctccccaccgcctaggcgtgcctcagtcacactttttaaatacattggtattaagtactcagaatggcaaaaagaaactttgggcattaattagacatttcactttttgtgcaactatttgtgacttcagagattgatatgttttctacattacagacttttgtgatggctgcatggtctccactgtcaaagaacattagtttaagtagaagaaatattgctctattaccttcctccctctacaaacaaaatcctaaaatgtggttatgtagtgccaattcaaacttgtagatgcatgactaatgctttcattatgctgtgggtttttatactatgattcatgtccaattacataacaattagctggagtcaggatatgtcacggaaattttaagcctggcaggatgattgtttatattttctctttttcggtgtttaagtcaaagtaaacttctaggctgctcttttataggctagttgggctgttggggagatctacacattaagtgtgaagaaatcttgtctaactccagtttggttgagaactgtaagctgtcataacatttgttgcatgatgaggccttgtgggattatcatgttagctgtaaactctaaacttacttgaaatctagtgttgtgtctccttatttctgtagtcaaaattgaaccttctgtacgtttttgatacctgcgactagaatgatggaattctgaattactgatactattacaaccatctgctaagaacgaagatgactcttagctaatttctcagcagatttagagaaattaagaagaattactaatgaatatttaaagagaaaactaccaagatatgattgtattgatgaaaaacaccaattacaacctaaccaacattcgagaggttggagctctcccaagtaaccatttctctcactaaacttatcaattttcaagatgccttttccattctcagttcctctatatttatactactccccttagcaaactacccaacttattccccaagtaaactaaagagataatatctaaaatacccttccccctacaataatattagttcttagcattaccggccccctaaacttccaccttgtcctcaaggtgggtcgtaatcatcactaaattctgggcctctactcgtatattcagtgtcttgcagcccttcaggccccaagcctaggttatgcagctcgtgttgcggctcctcctcatatagttctctggctggagtgagtgcctcaactataatgaaaaagtcctggaggtggggaaggaaggagtgtctgaaatggtgtggtgtgctgctggtgttatgggcttgtgcctgaaagttttgggtttaaagagatggagtggagaagagtggagaagtgactggagacgtaaaagaaggaatcataatttttgtaagtggtgggttgaaaaagttggtgggaagaattgtttttataaaatgtagtgtaatggtcgaaaaatgggtggagtaagtatggtttttggctggggatgtggtactgggttgaaaataaataggtctgagcttacttgtaaaattggcctcaacatgagcaggcccaatatcttgagccaattccccaaaagctggcaatagagcactcttaattgcattgttgtgggccatcgggctccaaacatatattcggaggagccggacttctttggtgatgtcattagcttggcccattgcacactttcccttaacagcctcaagatcttttcccacttttgtaccccaaccacgtggcttcaccatcctttctttcttgcttttgtcacttttttggcaatatacgagtttgtccttactaccctcatcttctaatgttggcttcctcaccaagcttaatttctggaattttgtccaccaaatcccaccacccatcgtcaacaccatacctatctacaccggccaagaagcctggtcctccacccgaattttcgccacagacaaagcctgaacaaccgtcagttctctcaccggagaagttcacaggtccaccacctgacccactagttgctgatccacccttcacaaatctccctcctctggctgccacaagtagtggttcctccgtaatactcatatttctcgtccaagagccctggaccaccaccggacccacttccaccggcaccaacttgttcaaatgatacttctctttcttttccaaacagcctacttggactggaaaaaccactgcgattgtagcctccgccagatctgtagcctagtgcacctaacgtgcttccaactgcaacccaatagggatggaaatggatgggattcggggagggtggagcatcacccgcatccgtcacccgcatccattcgctccacccgctccacccgcatccatccatccgtcacccacgggtgaaacgggtgggtcggtgataaacgggtggaaccatttagggggtgtttggtatcatgtttttttacaaaagaaacagaatcaagtaacaaaatccgtttctacttgtttggttctatgttgctcagactcgagtacccatgtccgacacgggtacgtgtccaagtgtccaactcagctattttctagaattttttatattttttaacccaaaacaaagtgtccaagtgtcccacccatgtccgactcccgaggatccgacacgggtacttgaggtgaaatgaagagtccgagcaacggaggtttggttagtgtgtaaagtaacaattaccgttacttgaggaaaacacatccccccaagttgtttccattcaaaaacctaaggaaacaaataacgtttcactcctcaaacaagaggaaagggaatgggttatatttatttccattccattaggataccaaacaactaataagggtaacacttattattatcctttcccctccttatcaaaatcctttccattccgtttacggtattcataccaaacacccccttagtatattttctaatgaaatttgtgatatgatatgcatgatataaaataattctatcaaaaatataaaaagtaagtaaacttacatgtacaacttaatagatgggtgatgggttggaggttaaacgagtgatggatcgggtgacgggtgaagaaattctcacccaccactcgctttccatccatttaaattaggtttttcatccatttaaaaaaccgggttaaacaggtgatgtatgatccatcacccatttccatcctcaaacacatcccgatttgtttactgcaccaccagatccaccagtataaccacccgaaaaatcatcatgccttctactagccttgtaacctgctcccggtgagaagcttcttccacaagtggtggtcgctggacctccatctccttcttccccaaaaaattttccatgacacccactcgacccttcatctgtgacaacctcttcttcgtccacctctgaagttttggggtcgtcttcctcctcaagctcctcttgaagtaactttaacttccgttggatgggagagaacgcttcattgattatcttcaccagatcttcttgaagtttctcgaaactttttctcacgttttcctctacctctttcgtgatttcctttccgatctccttcatttttagactaggagctcttgcgattccatggcagatttctttttttaaaacaagaaaatcaggcacttaatctcccagaatagtggtgctctgataccattttctaagaaccaagatgactcttagctaatttctcagcataacaacaaatttagagaaattaagaagaattactaatgaatatttaaagagaaaactactaagatatgattgtattgatgaaaaacaccgattacaacctaaccaagaggttggagctctcccaagtaaccatttctctcactaaacttatcaattttcaagatgccgtttactactccccttagcaaactacccaacttattccccaataaactaaagagataatatctaaaatacccttccccctacaatattagttcttagcaccatcaaactgggatggatggttttgtaaggttccaatttacttctccatcaaaatattttaggattttttatctcatgtattttagagtttcctcgtccctttttatctgataagattcttctgatgatttgattttatggtaggctccaatcagcaatattaaagaactgaagattctgaaagctggagttccattttcacttgacttcattccagaggtttgtatttttatagtggttagacatgcttcccctagttttcaaagtaaaagcatccttgttgtgacgatattttttcccttgtttttgtttttattattatcatcacttatttccattttctattttccatgctgataagatgttcatcaccataatcttgtggtatcagaagtgtttagtggagtttattcactacacatgcagttgttcttttgccatgaccgccattcattttctcgtcaaaacaaatctatgaagtttggttttcagactcatggttcttgtagctcttgtgaatttttttttcttctccttgcatgcattcttcaaattacatattgcatataccaggtgctctcctttattttatatttaatttttaaaattctatcatatattttttaatgtcaaacctcaaactaggggttcactgcatcttaggcttaccaggctaatatttctttacttaaccttttccctttatatttgctatcctcttgtgtagtaatcaccataagaagggtacaaactaaattaccctcccattcttttgtatcattctgaaatagtgtcacagagctttgatttttttgccctcatttaatctggcaaatgttctctctatttttttttttttactttcttttgacgggattctcaggcaattgttacggggagcagccagtcacactgtttctgtttattatgcaggtgagttacctgcccctctctgttatgattactgcgtttaagaagaccagcgttacaagacctcttgagggcttcggagttcttatcccttcgaatgagcaacataatggactgaagactctcggtaattgtctggttcacgtgtgtagcgaatcagattttcaaaccctgatttcgtaacattgcaggtactctgttttcatctatgatgtttccagatcgtgctttctccgatatgtatctctatactacctttgttggaggaagcagaaatagagaacttgcaaaagcttcaacgtatgagatatgcaatgttttaaatgtatgctatagtcatcgtttcaaccttttggtgcctttttcttactaatttatcctcctggtttaatgatcttagggatgaattggagcaaatagtttcgtctgatctccaccagctgttgggcactgagggaaaacctacttttgtgaagtattgatatctttcacccaacttaacatgatttgtgcttataatatgttaaataaagtaactgaaatcctgaaattaagactacgaaactgtatggtgacagtcatttttactggaacaatgcattccctttatatgggcacaattacgactcagttctgagagcaatagaaaagatggaaagagatcttcctggacttttttacgcaggtaatctgtcatttgcttgttgcgataaagttcatgtacagttggcatatcaatcaacttgcattctttcttgctaactccaaacaatcaggatcattaacttgtaggctgcagcaacagagagtatctcccaagttgttaggtttcatgtaacctcgtcgctgagatgaaatttccgttggctaaaaagtgaaagttttgtattgatgttacccaaaacaaaagtattttgcatgttgcttgaagttttggttgtttcagatagtacatcctttgacatgaaaataaatggaaaagcgtatgtcaagcaattatcatctagtttctttgtttctagatactagccgcatttgatcccagatcatttttgaggaagtcagctgaaataccgtagctatccttcagttttcataataaaactttaatggatctgatgtacagtaatttagtgtgcaccgggttaataattgatattaacttcatatagtgagtcttataaagatataatgaacttatatacaatatagtggattttattaatggaaaacatatagtgaaactatatgcaatatagtatgatacataaagacttagacaacaagagcattcgaaattacaaagaacaaaggaaagaacaattgtatcaaaccggttcgaatgaacaaacaaccaccacttccacaatcaatgtaccaccaatcaagactaaactataacaatgagcttctagtttaagtctactttgagttttaatcaccaattcaacgattagatgatcaaaattgcaaaggttaagagttggtcaaacctaaccaagagttacactaggcacatagctttgttaggagtatattagtttatgaattctagttaagttagaaatccaatacctagttggattaggattcctaattggattagaattatagtttagttagaattctagtaatagtaggcgtgtgattaggagatataattagcttaattcttatattgttagtttaattcttatcctcgttttaggtttatctttagtcgaacttgtaccctatataaggggcctttatttcattaataatatagtttattttgagtttaaacctttacttgtgattgtttgcttgagaggttattaatcgaaccattaataacttttcaggattgttaagtttttagtgttaaacatcttaatttcaggagtgattttaagagtgtttagattcttgtattcaagtttcaggactgatcttgaatcaagaaatatccctagtttcgactaatatcataagtagttcgaattcttggagtcttttcttcaagattcatattcataacttgattatttagacttcttggttttgtaatcatatcaagtggtatcagttttccagggaggagaggatacaaagggttctctttgatcaaagaagatccaagggcatcaataagaatgacacttgcaataagttcgagtgatacaaacaacttcaagactcgatcttttgctaccaagaaccaatcttgacgcctgaagattgttaggacaaaggataagaagtgtttctacatccaagattgcattctttacgtccaagattgcgtcaagatccattctttaagttcaagaaaggagtagaaagcattcgaacactacttaaacatgacatccgagatggataagctggctatggccatgagtgccttggcacaatcacaaactgagtcacgcaaccacatgggtaggatggaggcacgtgaccgtggattgaaactagatgactatagtggagatggcaatccagaagacttgttggagtggatttgccaactaggcaaagtgagtgattataggggctttgatcacaagaagagattcaaggttgcttccattaggctcacgaagtatgctggaatacggctcgaaggattgcatgcacaaacttcttgcctaatgactatgaacaaaaacagttcataaggctcgcatcaataagccaaaacacacttagtgtacacgaatacagcatggagtttgacaaattagggcttatatgtgacatagaagagaaagagcaatacaagattgcaatgtacattaaagggttgaatcgatatatagccaagaagatcgaagtctcaacttatcacttctttgaggatgtgactaaattggctaagaaattcgaagagcatgacaaagaagaagggcctaagagttcttacacacctaagtatgactctagtgctaaagggaaatcaacagttccctactcaaggtggtcggaaagacctaagaaccccactacacctaaggaggacactagcatggagaagacaaaagtggccgtacctaaggagagtttaattttgtgttttatacatctttgcttaagagcttaacaattgaaactattaataacttttcaggatggttaagtttttagtgttaaacatcttaatttcaggagtgattttaagagtatttagattcttgtattcaagtttcaggagtgatcttgaatcaagaaatatccccttgttcaactattataattgatcttattcgagttcttggagttaatttcttcaagattcatattcatacttgattattagacttcttggtttagtaatcatatcaatatcattagcattaatttacccccagggagattaagaaaggattagcctaatcaaggcgcttaagaagtttttaggaaaaatcgtgcttgttaagcttaagaattgaacttctttcaccatttgcccttgattctcttgttgaactagaagatcttggttcatagtagatgctcctgcatcatagtagagcatttaattttaattttttaacatgcacgaagatgtaggtagtgtagtatatatcgtgagacgtggtttaacatatagaaagatgtagtttctgcatgatatagtgagtttttgcatgatatagtgaatgtctgaatgatacagtggatcgttccgaattgttgtagtttgtatgatatagtatttttgtgaatgatatagtgagtttcttcatgatacaatgggtttctgaatgatatagtggattgcttagaaatgatatagtgagcttttgtatcatgtagtaggtttctatgtgatataggttgttaaaagatgatacatgcttttggcctcatgtactctaatgttaacgtgaacccggtccttgcaagtcaattgcagttttttcaatattaagctatttttttttttttttttttttttttttttttttttttgtacgggaatatttagcatctttaccacaaacataaccatacgaatattatgcggaaattccagtctgaagtcttaacttttcaaaattaaaagcttctatattatttttggaatgaaaaaaaatgagctatggcatgttattttgaaatacaatgagtctcaaggtgcatagtggcttcaattctacgaataatgaatggactactgatttctaattttttgttccgggcttttgcattaggtaaccataaagatggactctctgtgggaagaactatttcctctggatacaaagctgcggagcttgtgatatcctatctcaactctacttaagatgcctaaatgatcgaggagactccgtaagtcctttctctgattctatctttgaactgagtggaaacacgactgtggtctaaagtagttgatgtctcagatatccagaaatggcgttagtgatattcaggagctgtccattgaccctttgattcattgttgcagtttactgaaagttgttagctggtctcagaaaaacgaaaggaaaaaagggggaaaacaaaaacaaagaaacgtagattgtggtgttaaaatcaagaattccagagatttgtaccttctttatcagttgaattgtttacagtgtgaatcaagaagttagctcgaccttcttttcttgtgaatggtaagatttcgtgatcatcaatacttgattgtgctgtttgcaacttcaacggtaagatttcctgatcttacagtttaattgcttgtgctgtttgccactt

SEQ ID NO: 8 - DNA, 1575 bp, synthetic construct
  misc_feature 1..1575: note = R126A mutated Beta vulgaris PPO2
  variation 378: note = n is any nucleotide
  source 1..1575: mol_type = other DNA
atggtaatgctatacgattctcacctctcaggagtctcaactcatcttcaactatcgcaggcatttcccaggaagaacccattaatggccaaagtgtctgagccgggtaaacccacttctgctaaaaggattgctgttgttggtgctggtgttagtggacttgctgccgcatataagctaaagtcccatggcttgagtgtgacattgtttgaagctgatactagagctggaggaaaactcaaaactgttgcaaaggatggtttgatttgggatgagggggcaaatactatgatagagagtgaagcggaggtcacgagtttactcgatgatcttgggcttcgtgagaagcagcagtttccaattgcacaaaacaaagcntacattgcgagagacggtcgtcctgtgctgataccttcgagtcccattgcacttctcaagagcaatatcctttcagcgcaatctaagctacaacttatgttggagccattcctttggagaaaacgctatgcttctaagatttctgatgagcatgctcaggaaagtgtgggtgagttttttgagcgacattttgggaaagagtttgttgattatctaattgatccttttgtcgcgggtacaagtggaggagatcctcagtctctttctatgcgtcatgcatttccagaagtatggaatattgagaacaagtttggctcactaatttccggattaattcaatctaaactgtctccaaagaaggaaaagggtggaggaggaaagccttcttctaatgaaaagacacgcatacgtggttcgttttctttccagggtggaatgcagacacttgttgacacaatatgcaatcagtttggtaaagatgaactcaaactacagtgcaaggtcctttcattgtcctacagtcataaggggatcccttcttcagaaaattgggtcgtgtcttctgtgtcaaaaaattccattgaagatcaacaatatgatgctgtcatcgttaccgctccaatcagcaatattaaagaactgaagattctgaaagctggagttccattttcacttgacttcattccagaggtgagttacctgcccctctctgttatgattactgcgtttaagaagaccagcgttacaagacctcttgagggcttcggagttcttatcccttcgaatgagcaacataatggactgaagactctcggtactctgttttcatctatgatgtttccagatcgtgctttctccgatatgtatctctatactacctttgttggaggaagcagaaatagagaacttgcaaaagcttcaacggatgaattggagcaaatagtttcgtctgatctccaccagctgttgggcactgagggaaaacctacttttgtgaatcatttttactggaacaatgcattccctttatatgggcacaattacgactcagttctgagagcaatagaaaagatggaaagagatcttcctggacttttttacgcaggtaaccataaagatggactctctgtgggaagaactatttcctctggatacaaagctgcggagcttgtgatatcctatctcaactctacttaa

SEQ ID NO: 9 - protein, 524 aa, synthetic construct
  REGION 1..524: note = R126A mutant protein of Beta vulgaris PPO2
MVMLYDSHLSGVSTHLQLSQAFPRKNPLMAKVSEPGKPTSAKRIAVVGAGVSGLAAAYKLKSHGLSVTLFEADTRAGGKLKTVAKDGLIWDEGANTMIESEAEVTSLLDDLGLREKQQFPIAQNKAYIARDGRPVLIPSSPIALLKSNILSAQSKLQLMLEPFLWRKRYASKISDEHAQESVGEFFERHFGKEFVDYLIDPFVAGTSGGDPQSLSMRHAFPEVWNIENKFGSLISGLIQSKLSPKKEKGGGGKPSSNEKTRIRGSFSFQGGMQTLVDTICNQFGKDELKLQCKVLSLSYSHKGIPSSENWVVSSVSKNSIEDQQYDAVIVTAPISNIKELKILKAGVPFSLDFIPEVSYLPLSVMITAFKKTSVTRPLEGFGVLIPSNEQHNGLKTLGTLFSSMMFPDRAFSDMYLYTTFVGGSRNRELAKASTDELEQIVSSDLHQLLGTEGKPTFVNHFYWNNAFPLYGHNYDSVLRAIEKMERDLPGLFYAGNHKDGLSVGRTISSGYKAAELVISYLNST

SEQ ID NO: 10 - DNA, 37009 bp, synthetic construct
  misc_feature 1..37009: note = R126G mutated Beta vulgaris PPO2
  variation 3684: note = n is any nucleotide
  source 1..37009: mol_type = other DNA
tattccatcgaatgtagcaaattgactgtccgttgcaatttcggagtttccactcgtcgcatggtaaatggtaatgctatacgattctcacctctcaggagtctcaactcatcttcaactatcgcaggcatttcccaggaagaacccattaatggccaaagtgtctgagccgggtaaacccagtaagtcaaacattcgaatcacaactcaagcaaatttgtcttgtttgcgttatattttgctcatttcagccttttttgtttttccgacctttgcatactgaatattgtgtgtgtgtgtgtgtggggtttcagcttctgctaaaaggattgctgttgttggtgctggtgttaggtaaattttcgtctcttgcagagtttttgagtcatttgggaattctatgtgaaacttgtaactcccttcagtccaacgaacgcagtacaattttctatcaaatcatggtcctaatttccaattttccatatatattgttggaattatattgggattgtctatcactattaatagtattaggatcaattgtagagaagcacagaaatttttgggatcgaaagaatatctggattgccacattaacagcagatataattcttccaattggtttttggttcttcctaccttgacttgtctggtcaaacattataaactttaacctttaatatccattaaagtaaactataggatttttttgtctaaaacatgcttatataacatgaaatttgtgagaaaccaccttatatatatttttttgcgaaaacaaaccttaaacaaaattattatcgtgagaacaaaccttatgccaatttcgatcattgacccaaggttttggcattgaccgtgtcatgaattttgttgggtttaaaaagtcatgtgtcttgcatacgaaatggtaaatgcgggaaccttgggtcaatgtttggaatccgcataaggtttgttctcccaaaaaatgtttttgttcaaggtttgtttttgcaaaaaaacttatataaggtgctttctcagaaatttcatgttttataaagtagtatttgacaaaaaaccctaaaatatattatagaattattattgactaaattgtgtaaaaatgtactcttctaaaagtacattatagtattttagtggaacatttgcgagaaactactttataaatacgatttttgcgagaaatttcctaataaaaaaatgtgaagtgcaaaactatcttattgataattttctactccctcaaatccaaaatactatgaagtctttcctttctggtttgtcccagattagtttgtacgcttccatctttggtatgatcccacttttattatacttattagttttacgtgagttccttactctatctcttttaacaaaaatactcaactatctctatccaataaaaagttccttactagtcctatcacatctgctttttaataaaataacgtttgataaccacacaacttatatccttaaaatacacgttcaaccaagtgttgagattaatttggacggagggaataaatattttttgaggcatattggtagcagtattcggattccgataggttgactatgtttccaatgttgaccaacacttgccttgcatgtaattctaactttgctcttttttattcttcatttccctcgtattccatatacaatgtttagagacccattccttcctcttctcttctttcccttccttactatgctttgccataatcttcctcaaatgagtgcaaattaatttgtcgttgatgtaggccaactgattgtagcacatcttcatagttcatacctcaacacactcgtaattatattataccctacatgttaaatggctcatgaagctttattttatatcatacttcctccgtttcacaataagtgtaacacttttcttatttggaataatcacaataagtgaaaccaagctccaaatggtaagaaaagttcactcttattacaaatataccaccaaaaagtaagaggggatcacaacttcaatacttcttcactctactttattgtggtcccaactttctctctctaaattccttggtaactccccactttctctatgtttcacttatggtgaaatggaggaagtattttgtagtggtatttagctactaggccttggatgatatacaatcatacaatgtatttatattcacgataatttgctgcccaccttgattaccatgatttccaccaattttatcaatttcagtacttcaccaccccgaatttatattttttatttccaaccttggtatctccatttgtctgagtgcccgatccatttgtatcgcctccagaattgaagaagcttcctgcagctagacaattaggaaggttaaaaaagtttggagatggtggaggatagccataataatcattgttgggaggtggaacttggaaggttattgtagggttgaagtccttgatgaagaagaattgagttcaaatgagaggaaaaaggagcagggaagagggacaataagaaaaaaaagggtaaactaaaatcacgtgtaaggcatgtgcagatcaacatcagaaagcatagtcaacctactggtattagggcactgatacctttttgggtcaaaatttttttacaaggtatttcatgaggtagttttgtccatttttttttttacaaggtatcgtctcattttttttttatcatttagtttctcgcaataagtgtatttcatgaggtagttttttccaaaatttcctcatttattataaaatacctcatcttttccataaataatgcaatgtctagacttttacgctgtttacacatgctcctttgaccatctattgacacacaaggaaaaatagagtagagtcatgcaggatcttgttagatttttctcgatatatactttcaaaagatcaatttttttataattttttttttgaggggattttttttttataattatgtacttatcaaaggtcaaagttgtgcaccgggaagcataaaactctatgtgttgcaatttacatggaaggggaggagtataataagagaaaattatggtaaaaggttcattcctggagatcatgagaaaggaagtagaaagaacaaaaaagaacaatgggagtgcttttcaatgtttgttgtacgtagcatttattcatttgctataatgttttgtgacattgtagtggacttgctgccgcatataagctaaagtcccatggcttgagtgtgacattgtttgaagctgatactagagctggaggaaaactcaaaactgttgcaaaggatggtttgatttgggatgagggggcaaatactatggtaatgtttttgattattgcaggtcttgcactttagcgcacaattaatttctggatttttttttgtactgtggtggttatggtcatcaacatgtctcacccactgtgcttgcagatagagagtgaagcggaggtcacgagtttactcgatgatcttgggcttcgtgagaagcagcagtttgtaagtctttcattatctgaatggcacatactttatttcgaaagattgtaattgccttttctttctagatggcttcatcttcatgttgctttctgattcagtttcgtggctaactttccaagtttgtctgattgctaactctgtcatagccaattgcacaaaacaaaggntacattgcgagagacggtcgtcctgtgctggtaagtttgcttgttttacttttgacctcttttaagatctttcaactctggagcctggaaacatggtgatgcaggaggcaagttctctctattttacatcctttcttctctgtatcttatgacatttgcctcttattctgtgcagataccttcgagtcccattgcacttctcaagagcaatatcctttcagcgcaatctaaggtcgttttatgttaagacatacttgatgctgagagtttattgaattcttaaccttcttcttattttttttttatttttttagcaaaaggtaagtatattgcatttaccaaaaaacagtatgtacaccaccacagcagccatgtcagaatctagaaataccaccgaaaaaatcctacacccaaccagagacagttatattatatcctactcctaagtttctgtacccaatttacatcaatattggtccatttacaagatatttttataattcacagaagcacatcagttttaattagtttaataatgacctctggatgaataaccaactcagaccatatagccttattcctggctttccggaagttgtacgccagagcagcaagcacagcaatgcaaacctgtttcttatacctccttttatgtgtcttagcccatctcttatagctagtgaagatacagtcgtgtgcacaggattgaaccccaatccaactagcgaaagcctcacaacattatgactataaatacatctgaagtataaatgctgcacctttttctcctcttgcctgcacggtatcagaacaaatcccagctttagctaacaattccctggttttcagtttattcaatgccatcatgcaagcaatgaaagaatgttttggaacattcagtttgttccaaacacagtgagagcaagggacctttcctgcagttccacttagccacttatatccctgactaatagtatgactctttgcaccgtaaattgatttcaacttaactttttcataagcagtgaattgtgtgttgttagagtgtctagctgtctaggagattgggagaaaaggagggaccaaggagatagaaacacacctttgtgtttctttgtgtatttactttttagggtgggtcacgttttctgagaaatttgggaaaaggaagaaatagtaacacactttcccatttgtataacctgtatactggagctccaatataatttgcatttttttttgagctgcaagaatatgttgacaaacagttattgcttcttcctcagctacaacttatgttggagccattcctttggagaaaacgctatgcttctaagatttctgatgagcatgctcaggaaaggtaatgtcaagacatgtgttacctcgccttaattttcgttccaggaggtgagcatgcatttagaactaaaaggcacaaagactgttggtggtcttgcctgttcaaatataatggagaggagttttcgctacatttaccctctcttgaagtggggttgaaatatagcatcaagttgaatgcttgattaagtttaaaggacttgtgtaactctttttctgtttactgtgattacatgacctggttgattaacataatggtctgtttatctgtagtgtgggtgagttttttgagcgacattttgggaaagaggtaatggtttaccatagtatttctgctttagtggtaaattgtaatgttgctgataattatacttcgctgcagtttgttgattatctaattgatccttttgtcgcgggtacaagtggaggagatcctcagtctctttctgtaagtgaacattttgtgcttcactcccaattttttggaggctggaaatagattcttttccagttgttctgtcaaaaatagatgtagctttattttgaatttgaagttcccaattgttcattttgactattactgattattgctaagagtggcattatgctattatgctcctaaaagaaaggtgaattttgacctacatatagtataatgtatcaatattggtttaattgtttgttcttttgttccttttggtgctcatcttgcgccttgttctcatcgctcgttttttcatgttgcacttgatttaaatttgctcagcttaacttgtctttttgaatttatattacttattgctatattttactaatttcgttgaaactaattttttgctgaacttttcgttttgttgaaatcatttttctgaattaacttgattttcctgaatagaattgaattttggtgatcttaccttttctgcagccttttatttctttcttgtcctttttccaatctcatttttttatatttccattgtgttgacatcttatcattaactgtgcagatgcgtcatgcatttccagaagtatggaatattgagaacaagtatggaccataagacgtttattttaatcgacatgtatgtttcttagtttatacatatattaattctgtggtaaaaaaaccgaacaagaatatctttttttttttctatcatcaaaaagggtgaatatatgtagaggaaaaagatttgaatcaagatattagcctaaagcaataataatgttagtaatagctttaataacaaattcaaaacgtacattaatgaaccgagaggccggaaaatagttaaagtgaccactaagagaagcgaaggattcatgatgggttttcaacccagtagggcaaatttgttcaatgttctttacaaatcaagcttattaccttgtgggtgtttttgctagagatgaatgatagaattttccctagttggaagtcttttttggttactttatgggagctagtgatgtaatttgtttcgccttatggcatttcctaacatgtgcttttgtgatgtattgaagctttttttttgccttaatttatgctggattttaattttgttctttgtttcatttttcttgcttttgaaaaaaatatatagatatgtatatattaggattggtcgaggattttgagggaagggaaagacctaagaaaacttggatgagggtgattgatagtgatatgagtctatttgggatcgaagaaaatattcctttggataaggtgtagtggagggttgagggagcaaatttatgcagattagcttgacttaaagtttttctttttgattatttttcatttacttgtgttttgcaaacatttactcatgaatgatgtaaacttcttcaaccaaatctctggaaaaaaataatctacatggaaaaaacattattaatgttaacttgacagagatcccatccttgtgaagcagctagcaattaggcatctaacaattgacattttaatggacaggatagaatgtctcttgatagtcaataccctctgtttcattgtatcccatagctactaatctagtttgtatctttccaaagaaccattattttgaagtttcaccttgaacacccattttgaaccaatatgtttcttgcccttggggagaggggctaattgccatgttttgatgcggatgcaaagacacttgttctacctgagcctattgacttgatcatggatactctagggtttgaactcaagggaaagaatcaagtcttggcatgtgtggtgacatggcgtggggatggagtaaagaagagtcatagttctgttaggatatgttcttgcttgctacatagaatcgtagttctgttaggattgctatgatattatatctagtagatagattttatagttaattaggataaacatgtgatgatcatgttataataggcatgtgattagaggataggattagcttaattcttatcttgttgttagtttaattcttatcctagttttatgtttatcttagtcgaagttgtagccatataaagggcgttccattcattaataatacttagttttgctttgtgttttaaacatacttcttgattattgtttgcttgtgagctaactaatcaaaccattaaagacttttcaggagttttagtgctaaacatcttaatttcaggagtgattttaagagcgtttagtgatcttgaatcaagaaatatccttgttcttgttcgactaatatcagtggttttgttcgagttcttggagttaatctcttcaagattcttattcaacttgattgttgagcttattggtttagtaatcatatcaagtggtatcagttttccagggaggagaggatagataggattctctttgatcaacaaagatccaagggctatcaacaaggttcaaacattgctgcttgttcaagacttgatctttttctaccaagatgcattctttacgtcacaaggtagtaataacaagattaagagtggtttttacatccaagaatcaatctttcacgtccaagatttcatctttcacgtctaagattcattctttaagatcaagaaagttataacaagcatagaagaacacataaccatggagtccgagatggacaagcttgccaaagctatgcaagcacttgcaaagtcgcaaactgaatcacagagtcgactcaatgagaatactaccacaatcaatgggattggtagtaacatgaataggttggaggcacgcatggatgccattgcaaccatcatacaaaagaagcttgatcggaatagtgccaacttcataggtgccaattcagaggaagagttggcagaacgtgaagaaagatcatccaagactacatacaatgatgatcgtggcttaaagttggatgactataatggagatagcaatcgagaagacttgttacagtggattcgacaacttgagaaggtatgtgattatagaggctttgatgacaagaaaagattcaggattgcctccataagactcacgaaatatgctggaatttggcttgaaagcttcaaggcacaacgagccaagaaaggtaaagaaaagttgtgtagttggacaaagttgaaagttcaagcttaaagagaagttcttgcctagtgactatgaacaaaaatagttcataagactctctactataagccaagacacgcttagtgtacatgagtacaccatggaatttgacaagctagggcttatatttgacatagaggagaaagaacaatggaagattgcaagatacatcaaaggcttgaaccgccacattgccaagaaggtggaagtatccacttatcacacctttgaggatgtgacaaagttggctaagaagtttgaagaacatgagaaggaagagaagcctaagagttcttacacgcctaagtatgatactaatgctaaggccaaggctagcttcctactcaaagtggtatgaaggacctaagaggctaagaacctcaccccacctaaagaagacacaagagttgagaagcctaaagtcgtcgttccaaaggagaaatttgaagagatgagaaagtgcttcaagtgtcaaggaaggagacacatagcaagcaattgtcctaacaaaagagtcctcaccatgagacaatacctagctttgcaagaagaggaggatgtctattagttcgtccctgatgaagagcaaacttaggggaagaagaggaggaggatgcttttgctgaggatgatgcaaggctagtaggggtcaagaggcgcaccttacatgtcgaccatacacctagcatggagcaaatggaaaaatcttttccacactagatgcaaggtaggtgactatatatgtaatggtataatagatagtggttcttgcactaatgttattgtatctgaggtagtgtcaaagctaaacttagctacaagggcacaccctaagccatacaagttgagtttgctagatgatagcactggcatgagagtaaagaaacaagctttgatttcattctctataggggttataaggatgagttatggggtgatgtattgcctatgagtgcatgtcatctcttgcttggaagaccattgcagtttgataaaaaggtcatccatgagggggactctaatgtgtactctgtgttggttggttctaagagggtatgtttgcatcccttagctcctcattcagtggcgccaaagcaaccacctaagacaccaagttactttctatcttcaagggagttcgaacaagaggtggaggaagaaggttgtgcttatgccttgattgtaagacatgctgccacaagtgtcaagactactagcaatgagaagctcgaagccttgatgaaagagtttgaggatgtctttctagaggaactacgacccttgagaggcatagaacatgctgtagaccttgtacctggcgcccctttgcctaacaagcctgcttataagtgtgatccagtggcatctagggaattgcaacgccaaattgaggacctaattgaaaagggctatttaagggagatcatgagtccatgtgttgtgccagctttactagttcctaagaaagatgacacatggaggatgtgcatagatagtagagcagtgaacaacattacagtcaagtaaaggtttcctatgcctagattggaagatatgttggataagttacatggggcatcaatcttttctaagattgatcttcgaagtggctaccaccaaatgaggatcagagaaggtgatgagtggaaaacaacattcaagaccaagcagggattgtatgagtggatggtgatgccatttgccttatgcaatgcgccaagctctttcatgagcttgatgaatgaggtacttcgtccgttccttaacaagtttgtggttgtttacatagatgatatacatatctatagccaaaatgtggaggaacacttgttgaacttgcgtagcttattcatgaagcttagagagcaccaactctatggtaagattgatggcgacgaggttgacgggggattatggcggcagtgaatcaccctctttgccggtcactgaaatacaacctgaggtatctttaaattctgtaattggattgactaacccaaaaactatgaaattgctgggaaaaattgctggatgtgaagttgtggtgatgattgaccctggggcaacccataattttttatcactagctactgttgagaaattagctattcctgtgtcggaatcggaaggatttggggtttctctaggggatggacaggcggtgaggggtagtggaatttgtagaggggtgttattgagtttaaatggtggagttgaagtggaaacagattttcagcctctgggtcttggtaattcggacgtgattttgggtgtacagtggctggagacgttggggacagtggagagcaattggaaaacacaaacaatggggtttgaaatcgagggtgtcaagttcactttgaaggtgacccatcactggcgaggtctcgaatctcactcaaagccatgatacgtaccttatgtaaagagggtggaggtttgtggcttgagttgaaccagattgagcattatcaggagaaaacaccgcattcatcagccttacctgaaattccagttttcttacagagagtccttacccaatttcagtctgtgtttgctacaccagaaggcttaccaccgataagagaacatgaacatgcaatagttcttagagaagggtgtaatccggtaggggtaataccgtaccgttatccacagttccaaaaagatgagatagagcgcctcatcaaagaaatgttggcttccggaatcatcaatccttccacgagccctttctcgagcccggtgatattagtgaagaagaaagatgggtcgtggcggttttgtgtagactatcgggccctcaataaagaaacggtccccgataagtatcccattcccgtgattgatgaattgttggatgagcttcatggggcaacacttttttcaaaactcgacttaagggccgggtatcaccagatccgggttaaggccgaagacactctcaaaacagcttttcgcactcatgaggggcattacgagtttttagtaatgccatttgggttgacaaacgcgccggcaacgtttcaatcccttatgaacgaggtcttcaaaccattcttgcgcaagtttgtcttggtatttttcgacgatatattggtctacagtagttctgccaggaacatgaggagcatttgaccttggtgttgcacaccctagcagctcataaattgtttgtgaatcagaagaaatgtgattttggcaggtcggaagtagcatatatggggcatatcatctctggtcaaggggtggctgtggatatggagaaggttcaagcgatggtggaatggccccttcctaaaaacctccgggaattacggggatttttgggccttacagggtactaccgcaaattcgtacttcactatgctcatatagccaagcctttaactgatcaactcaagagagatgcgtttgggtggtctgaggcagcaactcaagcctttgaaaagctcaagaaggcgatgatcacatcccctgttttggcaatgccggacttccaagagttgtttgtggttgagaccgacgcatccgggtatggtctgggggcagtgttaatgcaaaacaaccgacccattgccttttacagtaagttgttaggtgcccgggctcaattaaagtcgatctacgaaatggagttgatggccatctgcatggcagttcagaattggagatattatctgctgggtcgacatttcctcattcgtacagaccaacagagtttacgtcatctcactcagcagcgagaagtaagtactgccttccaacgttggatgagtaaacttatggggttcgattttgaaatacagtttaagccggggtgtgccaaccgggtagctgatgcattatcccgcaagacagtgggagaggttgaattgggtgcgctgatattaactcatggggtggactggaccgacttggagcgtgaaattgaaggcgatcctctgttgtgcaaaattaaacaagacttccacgggggtgctattactcctgtgcacttttctttggtggacaacaagctgttgttcaagggtcgatacgtgattcccagctcttcggtttttattcctaccttgctgcgagaatatcacgattctcccattggagggcattcgggggacctcaaaacatatctcaggatggctgccgactggtattggaggggcatgcgcaaggatgtggcgcggtatgtgcaacattgtagcgtgtgtcaacaacaaaaaatgtctcaacagatgccagggggggtactacaaccactccccataccttcctcggtttgggatgacttgtcaatggacttcgtggaaggcttgccatcttccaagggggtaaacaccatcctcgtggtggtcgatcgtttgtctaagtacgcccacttcctcccactacgtcatccatttactgctgtgtcggtggcaaatgtgtttgtcaaagaggtggttcgtttgcatgggtttccttcctccattgtttcagatcgggatcgaatttttatgagtgtgttttggcgggaattatttcgtttacatgacaccacactcaaacgaagtaccgcgtatcatcctcaaacggatggtcagtccgaaatcgtcaatcgagctctggagacttatttgcgttgctttgtgggggaatacccgcgctcttgggctcagtggcttgggccgaattttcatataatacttctcctcatctctctaccaaaatgaccccgtcaaggtcctttatggtagagaccctcctactgtgatacgggttaatcggggagcctcacctgttgaaagcttggaaaacatgctccaagagcgagacgcagtattagatgccttgcagattaatctgattaaagctcaacagaaaatgaagagtagtgctgatgctacaagaagagaggtgcattttaaggtgggagatcgagtgtacttaaaattacagccttaccgtcagaaatctttggcttaacgcccttatgagaagttagccgcccgtttctacggaccatttactattttacagaagattgggcaagctgcatacaagttacaacttcctgtttctagcaaggtgcatccggtgtttcatgtctcccaactgaaacaggccgttggttccattcccgtttcagccactattccagagcaattgtcttctgacttggagttagaggtggaacctgatgaactcctcgatgttcgtagtgtttctagaggccagcacacttacttggaagctctcattcagtggcagggattaccatcattcgaagctacctgggaagatgtggctgctttccatcaccattttccatccttccaccttgaggacaaggtgaaactttgggggggtggtaatgtgatgcaccaaactaccactccactactcacctattagaggcgtaagaaaaagggggtaaatcaggaatagtttacaaattctgttgaaaggaatattttgtaattatgatgtcagaggttgttagcaaaaaggcagtagagtaacaataaaaaggggaagggaggagagaagaaggtattgagatttttgtaaggaacttggcccttgggagagttgggagcctctcgaaagctcaccattatcttgtgaatattttccttcctggttatatacaagaaccttcctctgtcaatttcttttctctctaatcttatttcttattctgttttctggttgccattgtttgaagttgcttgttgtgcttgagtaaatacgtgaagtggtgaaacccatctgaattcatcacatctattccaagtggtataatacaagcttgtaatccaaatctaatgagaaatctaagttatgaagaatttcaaaagaactaagtacccttgttttggatgcccaaggatttacttgccgctcaagttaatgctcaacgtgcaagatacaacctctttagtatcccaaggtagtttccataagaattaattgagctcaaatcaagaacaatatttttatgtattaatgtgaacacttcctgaattatattagatatatggtctgaaggttggaagaaagattagcttttaattttaagtttgagatagtttttagaatcgaggaaagattagctcttaacttgtaaactaaggattgctttataagtaaaacattagttatggaactcttaaaattggttttgaacatttctagttaaaaatcccatgtaattctcccaaactagcttaaaatctcacatttcacaagctaaggagagacaaatggcgttctcttgtgaaacaatctaaaattttcattaggctactgttttcaagtatttatatgttagaagtgccgcatataggtacataaaataagtttacaaacacaagtaggaataaggaaaactaaaagagaaacttcagccatacaaaaccggctgaaatcagctactactttctactttctagcttcaaaatctgattgcaagtctcctttaagccaatcaccaatgaaaacctttcctccacatgaagtgtgctcaaatcaagagaagaaacccatcattcgcctatagctacctgggtcagatgaagatacggcaaaaaaaacgctggaaatcagtgaaccaaaataagcaccaattggatgctttctgtccttgctacattttcttctcataggactacttcaagccatacatgaataagcagttagatccagctcctagcatccatttgatcgtacaaatgagctccaaaaagataagtaaaaccaagcagccaaaacctaattaatactaatgatgaattagttgaatagctaatgacgatgaagcaacactttagtaggaatagtgttaattatgatcaatgctacttaatcttctgattaatttttggaaaaatgtcatatctaccttctgtatacacttattcataactatatcgtattattattatttttaaataactaccttttaagtaccaaaacctaagaaatcaggcacttgatggattccatccaaagatccatttggcggggcccactaactgacttttgattttttgcctttcctcttttggttaatctcaatggttcatcaataacaactcaatcttctccccatttcatcaaatcatccctaaatcagaactttttcaaattcacccaaatgaggttatggaaacctctaccaagtttattcgaccacttttagtctagctcaaagttttacacttgcttcaaaaactaagatttattaactttagaaattaggtttttatttttattttttatttaactttgtaacaatcttaaataactcaggtgctttctagagtttggctttaattgtttttcccttggttatgtgaaagaagtatgactactttctccaagactaaagtagagagcaaaaaatgcaattctggaatttcttgcaaaagaaaaggaacgagttaatgataatgaaaaacaaagaaaatgatgagaagagaggagctgaatcaatcatgatcatgtattttaaagttttttttgctattgaagtgacttaagaagaggaaagaggatgagtgaagacaaacaaaagaaaggataaatagagggaaatcttgggcttagaaaggtgaaaaggtaagaagatgagttagtgggccccaacaaatgtatctttggatataatccgtcatgccactgtttggggcttgcttaagtccatacattacttcactaattttacaaaatttattttcttgaccaagaactgaaaaaaccttcagtggtgatctattaggttttggaagttaaaaggtagttatttaaatgtttttaatataaaaggtagttatttagatatttttaatataaaaggtagttatgtgaataaaagtgtatataaaatgtaattttttgacatttttgccttagtttttcttgctaattcaccttttcaacttgaccaagttgctatgaggagaaaacgagcaattattaagcaaatcgcaacactagcattaatccatggcccatgaaactctccataattagagattggattagcacttagtagaacttcttgctcctgctccaggtttccattacttctttatctaagtgcatcaaaaggttgttgggttatgaaaggtggtggttgtgtatagtcattgtcaaaatgttgttaatgcactctatttagaggatgagggattgaatagttttcacctcgtgacctttcattcctttttaaaaaaattgataatgtgtattggtcctatgactgtatgaatggtaataagctatctcatgagctgttactatcttcctcagagtctaggtagaagggtttgggctgataattttctactatgtgcaattagtttgttggatttggatatgctagttgatataggtcctttcccttgggccttctcttaatataggcctacagtgtgattgaagataaatcttctggagaatataagaacaatgagatggattggttagaggttgatttgttcttttggtgtaagactatttcgggttctctattggttatgttcagacgccagaatatgtgttggtgattgttttccatgaacatactttatccgcagagacatttttcttttttcttcctataagattatatttgtttcctctcttggtgctcatctcagtgtctctactttacgttaaactgttgacattacttgacaatgcgtatatttgtcgcatggtgctcttccctcactccacgtcgaccccatacatcaaaaaatgccattaaagaatattcgaactcacaaccttgtgttgaaagaatggaatccctaccaatgactcattaattcattttctctttaagaaataaatgatttcctcacaaacttttaggctttaagagcccaaaagataaaaacataaaataagatagacatcaacgtcaagattagccttaaatgcacaaagcacatgtcaaatgattgataactactcacgagttgcaactctttgggcgttgcctaatattaattggatctcttttaaaaattgttggtggttatggttggtggagaggaccatgtaacttttagctggtcacaactggtaatgattgtcacttttactgcccataaaaaaatttaaactgttgaatatgtttctggcagtggatctgacaaatcctttacaagttggcgtccattttgttttgccatgtgactcaattataatacgtgagttttattatccaccaggtttggctcactaatttccggattaattcaatctaaactgtctccaaagaaggaaaagggtggaggaggaaagccttcttctaatgaaaagacacgcatacgtggttcgttttctttccagggtggaatgcaggtattagcatgtagctttcattctgttaacatttgtggttcttccagacatacatccaatgctttttttttttcttgctataaccataaacattcttgtcatgaacattctttaatactgttgctgagcttagtgtattcgttcattcatgtaatttcctctcttgaggttaaaatggcatacagccttacaacctatatccataatgctccttagagtagaatccctaggttataacatagtaccacttatcaaaataaacatggcacacactgcaggacaagaagtaaatccacctagagaactgagcacctagtagtaaaagcagcgatacattactaataacagtagcagggccataagagtagtaaatgggcctcatttcaacactccccccgtaatggtgagagagaagaagcagtctgaactcccagcttggagagcaaaatagagtgttgctgaacagggagaaccttagtgaaaacatctggcacttgatcttgagatggaacataggtaggctgaataaccccttcttcatttgtattgtccctcaggaaatgacaatctatgtctacatgcttggttttctcatgatgaactagatatgctgctatggcaagagcagcttggttatcacagtagataggagtagcactggactttttaatgcgaagatctttgaggagttgtttgatccacatcacctcacacacagcaagagccatggatctgtactctgcactgaccacaagaaattgcctctttgactttcaagatacggggggagtcaccaaggagcacacaaaaccagatgtagaatttacaacacccatcccattcactatcacaaaatgctgttagttgagcactagacttgttcgccatgagaattcaccctgttggcagcttgaagatgcacattagtggggcagtgcataaatttgcttaaatcatgtatagtgaaggcaatatcaggcattgccttgtaatagtgagataaatgagcttccccatcaatttttgatacacatcaggttgttgaagaggatcaccattgtcagcatagagcttgacatgtgagtccatacgaagcctcaatcgtctgcaatttataaaaccatattcatcaacaagacccatcacatacttctttagagataaaaacgatacttcactacactgatccacttcaatcctcaaaaaatatcttaggccacccatatctttcatgtgaaattggccagcgaagaaactctttgcttcctcaatagttgctaaactattgccagcaagaatgaggtcgtccacatacaccaatatagcactgaaacagtgagagttttgcttgaagaatagagagtagtcacacttggattaagtgaatacattttgctttaaagcagtgttagcttggcaaaccattgcctcaaagcctacttcaagccataaagtgacttaagcagcttgcacaccttagttcatttggtgtcacttctgccatcagtacttagctccccctctccttgaactttgatcctgttacatgtttcactatatcctggtgatagcttcatgtatacactatcctacaattcaccatgcaaaaaagcatttttaacatccatttgtttgcaagaaccaaccctctaaggatgcaacaacaagcatgtggtcatctttgctacaggggtaaaagtctgctcataatctattccatatctctgtctgtcacccatgattacaagccttggcttatgcctattatttgtgccatcagtgctgtattttgttctgatccatccatgtgagggatggctcatttctacaaaatcctagttccgttaggatttgtgttgttttcctaattctagtaggaataggactcctaaaatcctaatcctcctagttctgttaggagtttaaaagttttagtttgattgtaattctagttgtgttagaaatccaaatcctagattcatgtcacgtatggttagaacatggctagtaggataatttgtcttgtgatgtccatagccttggcatttgtggcacctaactttcaatagcttgtcttctgtctccttttctttctccttctttgaggaatcaacgtttttagagctatctaaaccactagcatcaatattaggtttaaaagtgctaaaagatttcgaatagttcttacttgcatacaatttctttttctagtttatgtagcgtcaccagggaacaaaaactcggccgttccgttctggaacggccgctttgtaacggatttcagagaggccgttccgttaaataccgttctagaacggtgatttggaattcacaccaaactcggcgcgatagcgttacgtaacggtgtaacggcgttccagaaccgttacaatcacataacgtccgttatttgaagaagaccagttcttttggtggaggaagaagaagagccaacgcaagatctatagatctgagttaaaatttgaaaataaaacatgtttttttatttaaattaaagcttacagaggatgtagaactcaaattcgagtaaacccctcctttaatttcattaggttactgcaaatcgaaccctaaattgcaaaccctaatttcgaaaaaaccctaatatgcattgggatgcaacgctgcttctccggtcatggcagagaaggtcgacgagtcatcttcggctgcttttagcactgtagctgccggtggttggcttgtttgcaggttagtgcttgctggttttctttctctcataccgatcatcttcttcttttctctcttctctttttcttttttattgtgtgactgccagtcacgtgataattgcaactcataaagtatctctttctctctcttcttttcatccctttttatttttctttcccttttagtttttattccctcacgtggaatcacctaattttcatccttttttatttttttagttacactcttacacagaagtatgttcaaatatcattatagtacctcaaatattgtatttataagagttttggacataatatgatatagaaagtaaaatagaagaaaaataaagtttaaatgtcacttgtgtgatttttttaaaaaaattcacgccgcgacggccgcgaaacgttctatttcccgttacaagccgttcccgcgataacgcgaccgttcccgcgaacgcgaccgcgaccgcgttttttttccttgagcgtcacatcttgcaagcttcttcaaaggtgagttatgtgtacaactccaatttctctccaatcccctccgtcctcatttaggcctccaaggaagctacttaaacattgatcttcaagttcatcaattttccaaagaatggataacttctcgaactcctttatgtaatcttcaacggacatattcccttgtttaagagtagaccattccatgtacaagctttgtttgtagttagaaggaacaaaacgtcctcttaacaactttttaagcttatcccaagtagagattttgggtttattagctttcacacgctgcctctttactccatccaaccaaatagatgcatatttggttaccttaagcacggccaccttgtatttcttttcttttggtgtctcttaatcccaagtagagcttttgcgtgtgaaagctaataaacacaaaatctctacttgggataatcttcttcttgtttccgaaacaactaattcttatggtagttaggaaagcaagaatggtttctaattcaatagggaatatattaattattattagtttaagttaaatagtgcacgaatctaaatagattattcgtctcaaaatctcacttaagtatagatttgtttggacatctgagggaagaagaagagagcgagataaaggagaattatcactcaatgaatccatatcccgagttttcccatttacttctttgaaagcaatatagttcacgaggtcttattatcagtctatggacataagagtaataatttaagggcaaaaactatgactttatgggtttaaactgatacatgttctgttaaactgatagatgttctgtgttaaaccgatactcatatattcctggttaaactgatagatatatgatttaaattgatacccgtctcagtcatgtcttggattgagacggtctgacacaagactttttgtgtattatatatctgattagaataaatttatcctgtttactaattattttatcttctccagacacttgttgacacaatatgcaatcagtttggtaaagatgaactcaaactacagtgcaaggtcctttcattgtcctacagtcataaggggatcccttcttcagaaaattgggtcgtgtcttctgtgtcaaaaaattccattgaagatcaacaatatgatgctgtcatcgttaccgtgagttttactttgcttactgctattgcaccaatctttcttcttttgacacactgataatggcaatgctgttgtggtttgaagccatgttatggggttttagggatatttatggagtctgatctaatatgttattggataaaattcagatctgtaacgtgactcaatgagattgaaaaaaattgaatcaagataatggattggaaaattaggagctaacctagggtctataagcgatccacttggagtctcataccaagcaggtattcgacattttaggtttatattgctgctatggctcatatgggagcctacatagggtctggtgcttattcctttttcttttgtctagttttggggctgcacatttctgttgtgttttgatatggatagccatcacctgcaattgcatggaggctgaactaagttctataggggagcaaacagtatctgttggaaatttattttcatattgtgtttttaaatgctataatccaaaatttgttgttcccctaaaatgcctaaaatacccttatgtaactgctccatctgtcccttaatagacttcccatttctccaatgcatgtttgccaatacacattttgtattgttaatatcaaaaattacatattagtaaaaattataaaagtttgattttcctaatgtacgcaatgagacgaatcaaacaagacgccatatgactatgttttttcttatacttcctatgttttttaataagtgacatgttttccttttagggaaatgtcacaataagtgacacatagctcaaagtagtaaaaatacttctcatttattacatctttgccattatttaattgtttcacctacctactttatccaatactcaaatttgattggttgaacaattggtcccaactttctctagactccttggtattccctttcccccactttctctctgtgtcacttattaaaaaatggaggacgtatattggaaaaaaattggaaggttttcttcacttatgaatagtggtaaaattagagatgggaaggctattttgggatggatggagtaatatttaaatttttaaaataatgtcattgttttagtgatgaaataaaattcaaggctattttttctagtaattatgttatctgtacatcaccacacgtatcgcgtgcatataagactagtttgatgatattccaacactgttcgaaggaagtcaggcatggaaccatgtttgcttccatatgggaaatattttgcttactctccttcaaacatctacctcattatcccagaatgattgatcgaatctaatacaaatatacaattgatcatatgccaccagggaattacatcaaattaaatttttatagaaggggaatcagtcatagcctcatagggaacgaataagtgatactcgccagtttctttcctggttacttttcctcttctcactagccatcctttatgtatgggtatgctgcatcattcctgccactggttgggactcccgtttgaactatggggggatgggaaagctaagccatcatcttcaaattgagtttcttgagaatgtaagacaccatctgtaagatgaatatagtgcactctatagtcaatgtcatgatctttatgggtttatctgctgaaataactgtgatatacccagctctccatttacaaagttttcctacatattaaactcttgcccgcaattctagaacttcattgtagaacttttcctacataagcatcatttgtcttttctgtagtaaaagttagaaagagctttattttagaacattcgtttttagttttctttgttgttgattactccgccacttttaatacttttatgattcaagtatttgacaaaatcatgtaatttaggtcctctgctgcatgcagtctataccctctctctctctctctctctctctctctctgtggttgtgtcttacttgttgagttactaactccagccattacataaagtaggctggcattatgatgagcaaattactcaagaccacatgttagctcctttttcttttctccttattctgaaaggcaaatataggtccatcttggtgcttctcatgtcataagtaagctgaccccctccttttccagggaataggacaataatccaaaagtgagggttttacatgttgggatttgtgaagtttcttattttacttaatagccgagtcagtgttacaatacatagtaccgtgttacaaaatagtatgtaacaccaagcatgtttatgtgcaaaattgtgcaagactttgttgctggcacgccaagggctgttttaatgtagtttacttattcttttaggtttttcagatgacaatcataaagggaattaggagtgtttttattgtagtcaatccctattgtgctacaacgataaaagaaaaaagcacaagactagaaggagaagtaatgtctaggaaagactcctcacctggggttgctagtcacctacacatcttagaaggcatcaaaccaaagcttattcccctcgactgttttcgggagaaaagaagacaaaattgtttctaacttatactttaccagtttcactacagcatcagaaagaagcaaaatatgctcccacaacacggcgaacctagctttccagatgtgataaaccagaccagcaaaatgattattttcactagagctttgagtctattttttcggtttttccccttcttcctggtaatgtcacgccaccaagccatcatctcaattttttgagatttgacgtaatcgctcaaatagctgagtaagacacttcttgctctaaatactaataaaaaagaggtgaatgtgggtctcagccatgttactcaaatcggataaagtgtctactcttattagggtttttgggtgttggactcatccatttttttttgtaaaatgtcaagattttggtttgaaatgagagattcaagtgtcgtgacatgagtcggcacgcaacacttaaacgtgtcgaagtaacagagggtctcagacaatcaactttaatcaatcacgaaccccaaaatttatgcaacctttgctcatattcagtctctgtaaagcactcaactgcagcacacccacccattcgcttcacctacagcaggagggcacccaagtaattgctatgatgagcgaattattctgttttgccttgctggaatattgctgttagatttgctgactcactggcagttaattatagtcagagaatgagaaatatcctgtagagagagaaagggtatcttttgtatttagctctataaatagctaaggaagggaagggcattgagagtttatgatattataataggagagatttagcctctcgaatgctgataggagcgtagctcttgttggattatcaatactactctgtttgctctatctatttctactcaggttccttcttgtacagtggatccctgattggatttacttcatcaaccagcagataaaattatttgtaggcacattgaaaccattccaaacctaatgaggccaaagtttatcacaaagaatataggagccaaatgtaggcaacagataagagtataattgccagaagttgaagactccaggtattgttcagaaaccttaatgcatatcatcattctgacactagattttccccggagccaactaacaaaaatgaattaaagagattaaggctatgtttagttcacctgaaattttctgatctgaacttatctgatctgatctgaacttattttttctgatctgatctgatctgatctgaaccaatctgattacaagatcttatcttttagatttttctcaatatataagaaaaaatatagtcatgtggggtcttgtttgattcgtctcaatgagtactttattaatattcaattattataatttttactaatatgtaatgaaagatataatgatttttaaatataagcatgatctgaactgatctgatgtgaacttattttttctgatctgatctgatctgattagatctgaaataagcaaaaataaggtgaactgaacatagcctaagcaacaattgagggaaaataagatcattatggctaagataagataaatatgtaatgataaaatcagagtaattatatcagttacactctcaacattcgtcagattgaggtttcctcccaaaatgccaacccacttttctgtattttcacgtccttctctctacccttctaggtatatattacatcagctgtaaaatttttgaaccaactagtagaatactgatctaccctcaactgcctcactttctcattttttctgggcctttttctctctagcacaagtccacataagtgatgcatagcagaaatataattccactagtcatcctcaatattgatataacaaacacatcacccacatattatcatttttaatcgctgcatgcgaggcatacttacccaccaatcaggatatgcataacagcgttcctaattccaaaaccaccatatatcttgggtttgcaactctcatccctagcaacaaggggactttctgaaaaagtggcagattccgcccacaagtagtttgtacggacacctttattatattattaatatcatatttcggcaacacaaattaccagcccagtaaaacatgaattgacatgagactaacaaggggcccaatctaatatcgtacgtctgtactaagcaatgtataaaaaaaagctcaaggtgcattgatgcaatagggatcctaatgtgcataggtgcgcctcattgaagtgaggcaccactaaggataaataaaaaagattgatgtaaaattaaattgtgcaccttgggtgcgcctcgatgaactttttttgtgtgcctaagtgtacctcaagtacgcctcattgatatcgcctcgcctggcagaaaacgagcttgaccccaatcgccttgctccccaccgcctaggcgtgcctcagtcacactttttaaatacattggtattaagtactcagaatggcaaaaagaaactttgggcattaattagacatttcactttttgtgcaactatttgtgacttcagagattgatatgttttctacattacagacttttgtgatggctgcatggtctccactgtcaaagaacattagtttaagtagaagaaatattgctctattaccttcctccctctacaaacaaaatcctaaaatgtggttatgtagtgccaattcaaacttgtagatgcatgactaatgctttcattatgctgtgggtttttatactatgattcatgtccaattacataacaattagctggagtcaggatatgtcacggaaattttaagcctggcaggatgattgtttatattttctctttttcggtgtttaagtcaaagtaaacttctaggctgctcttttataggctagttgggctgttggggagatctacacattaagtgtgaagaaatcttgtctaactccagtttggttgagaactgtaagctgtcataacatttgttgcatgatgaggccttgtgggattatcatgttagctgtaaactctaaacttacttgaaatctagtgttgtgtctccttatttctgtagtcaaaattgaaccttctgtacgtttttgatacctgcgactagaatgatggaattctgaattactgatactattacaaccatctgctaagaacgaagatgactcttagctaatttctcagcagatttagagaaattaagaagaattactaatgaatatttaaagagaaaactaccaagatatgattgtattgatgaaaaacaccaattacaacctaaccaacattcgagaggttggagctctcccaagtaaccatttctctcactaaacttatcaattttcaagatgccttttccattctcagttcctctatatttatactactccccttagcaaactacccaacttattccccaagtaaactaaagagataatatctaaaatacccttccccctacaataatattagttcttagcattaccggccccctaaacttccaccttgtcctcaaggtgggtcgtaatcatcactaaattctgggcctctactcgtatattcagtgtcttgcagcccttcaggccccaagcctaggttatgcagctcgtgttgcggctcctcctcatatagttctctggctggagtgagtgcctcaactataatgaaaaagtcctggaggtggggaaggaaggagtgtctgaaatggtgtggtgtgctgctggtgttatgggcttgtgcctgaaagttttgggtttaaagagatggagtggagaagagtggagaagtgactggagacgtaaaagaaggaatcataatttttgtaagtggtgggttgaaaaagttggtgggaagaattgtttttataaaatgtagtgtaatggtcgaaaaatgggtggagtaagtatggtttttggctggggatgtggtactgggttgaaaataaataggtctgagcttacttgtaaaattggcctcaacatgagcaggcccaatatcttgagccaattccccaaaagctggcaatagagcactcttaattgcattgttgtgggccatcgggctccaaacatatattcggaggagccggacttctttggtgatgtcattagcttggcccattgcacactttcccttaacagcctcaagatcttttcccacttttgtaccccaaccacgtggcttcaccatcctttctttcttgcttttgtcacttttttggcaatatacgagtttgtccttactaccctcatcttctaatgttggcttcctcaccaagcttaatttctggaattttgtccaccaaatcccaccacccatcgtcaacaccatacctatctacaccggccaagaagcctggtcctccacccgaattttcgccacagacaaagcctgaacaaccgtcagttctctcaccggagaagttcacaggtccaccacctgacccactagttgctgatccacccttcacaaatctccctcctctggctgccacaagtagtggttcctccgtaatactcatatttctcgtccaagagccctggaccaccaccggacccacttccaccggcaccaacttgttcaaatgatacttctctttcttttccaaacagcctacttggactggaaaaaccactgcgattgtagcctccgccagatctgtagcctagtgcacctaacgtgcttccaactgcaacccaatagggatggaaatggatgggattcggggagggtggagcatcacccgcatccgtcacccgcatccattcgctccacccgctccacccgcatccatccatccgtcacccacgggtgaaacgggtgggtcggtgataaacgggtggaaccatttagggggtgtttggtatcatgtttttttacaaaagaaacagaatcaagtaacaaaatccgtttctacttgtttggttctatgttgctcagactcgagtacccatgtccgacacgggtacgtgtccaagtgtccaactcagctattttctagaattttttatattttttaacccaaaacaaagtgtccaagtgtcccacccatgtccgactcccgaggatccgacacgggtacttgaggtgaaatgaagagtccgagcaacggaggtttggttagtgtgtaaagtaacaattaccgttacttgaggaaaacacatccccccaagttgtttccattcaaaaacctaaggaaacaaataacgtttcactcctcaaacaagaggaaagggaatgggttatatttatttccattccattaggataccaaacaactaataagggtaacacttattattatcctttcccctccttatcaaaatcctttccattccgtttacggtattcataccaaacacccccttagtatattttctaatgaaatttgtgatatgatatgcatgatataaaataattctatcaaaaatataaaaagtaagtaaacttacatgtacaacttaatagatgggtgatgggttggaggttaaacgagtgatggatcgggtgacgggtgaagaaattctcacccaccactcgctttccatccatttaaattaggtttttcatccatttaaaaaaccgggttaaacaggtgatgtatgatccatcacccatttccatcctcaaacacatcccgatttgtttactgcaccaccagatccaccagtataaccacccgaaaaatcatcatgccttctactagccttgtaacctgctcccggtgagaagcttcttccacaagtggtggtcgctggacctccatctccttcttccccaaaaaattttccatgacacccactcgacccttcatctgtgacaacctcttcttcgtccacctctgaagttttggggtcgtcttcctcctcaagctcctcttgaagtaactttaacttccgttggatgggagagaacgcttcattgattatcttcaccagatcttcttgaagtttctcgaaactttttctcacgttttcctctacctctttcgtgatttcctttccgatctccttcatttttagactaggagctcttgcgattccatggcagatttctttttttaaaacaagaaaatcaggcacttaatctcccagaatagtggtgctctgataccattttctaagaaccaagatgactcttagctaatttctcagcataacaacaaatttagagaaattaagaagaattactaatgaatatttaaagagaaaactactaagatatgattgtattgatgaaaaacaccgattacaacctaaccaagaggttggagctctcccaagtaaccatttctctcactaaacttatcaattttcaagatgccgtttactactccccttagcaaactacccaacttattccccaataaactaaagagataatatctaaaatacccttccccctacaatattagttcttagcaccatcaaactgggatggatggttttgtaaggttccaatttacttctccatcaaaatattttaggattttttatctcatgtattttagagtttcctcgtccctttttatctgataagattcttctgatgatttgattttatggtaggctccaatcagcaatattaaagaactgaagattctgaaagctggagttccattttcacttgacttcattccagaggtttgtatttttatagtggttagacatgcttcccctagttttcaaagtaaaagcatccttgttgtgacgatattttttcccttgtttttgtttttattattatcatcacttatttccattttctattttccatgctgataagatgttcatcaccataatcttgtggtatcagaagtgtttagtggagtttattcactacacatgcagttgttcttttgccatgaccgccattcattttctcgtcaaaacaaatctatgaagtttggttttcagactcatggttcttgtagctcttgtgaatttttttttcttctccttgcatgcattcttcaaattacatattgcatataccaggtgctctcctttattttatatttaatttttaaaattctatcatatattttttaatgtcaaacctcaaactaggggttcactgcatcttaggcttaccaggctaatatttctttacttaaccttttccctttatatttgctatcctcttgtgtagtaatcaccataagaagggtacaaactaaattaccctcccattcttttgtatcattctgaaatagtgtcacagagctttgatttttttgccctcatttaatctggcaaatgttctctctatttttttttttttactttcttttgacgggattctcaggcaattgttacggggagcagccagtcacactgtttctgtttattatgcaggtgagttacctgcccctctctgttatgattactgcgtttaagaagaccagcgttacaagacctcttgagggcttcggagttcttatcccttcgaatgagcaacataatggactgaagactctcggtaattgtctggttcacgtgtgtagcgaatcagattttcaaaccctgatttcgtaacattgcaggtactctgttttcatctatgatgtttccagatcgtgctttctccgatatgtatctctatactacctttgttggaggaagcagaaatagagaacttgcaaaagcttcaacgtatgagatatgcaatgttttaaatgtatgctatagtcatcgtttcaaccttttggtgcctttttcttactaatttatcctcctggtttaatgatcttagggatgaattggagcaaatagtttcgtctgatctccaccagctgttgggcactgagggaaaacctacttttgtgaagtattgatatctttcacccaacttaacatgatttgtgcttataatatgttaaataaagtaactgaaatcctgaaattaagactacgaaactgtatggtgacagtcatttttactggaacaatgcattccctttatatgggcacaattacgactcagttctgagagcaatagaaaagatggaaagagatcttcctggacttttttacgcaggtaatctgtcatttgcttgttgcgataaagttcatgtacagttggcatatcaatcaacttgcattctttcttgctaactccaaacaatcaggatcattaacttgtaggctgcagcaacagagagtatctcccaagttgttaggtttcatgtaacctcgtcgctgagatgaaatttccgttggctaaaaagtgaaagttttgtattgatgttacccaaaacaaaagtattttgcatgttgcttgaagttttggttgtttcagatagtacatcctttgacatgaaaataaatggaaaagcgtatgtcaagcaattatcatctagtttctttgtttctagatactagccgcatttgatcccagatcatttttgaggaagtcagctgaaataccgtagctatccttcagttttcataataaaactttaatggatctgatgtacagtaatttagtgtgcaccgggttaataattgatattaacttcatatagtgagtcttataaagatataatgaacttatatacaatatagtggattttattaatggaaaacatatagtgaaactatatgcaatatagtatgatacataaagacttagacaacaagagcattcgaaattacaaagaacaaaggaaagaacaattgtatcaaaccggttcgaatgaacaaacaaccaccacttccacaatcaatgtaccaccaatcaagactaaactataacaatgagcttctagtttaagtctactttgagttttaatcaccaattcaacgattagatgatcaaaattgcaaaggttaagagttggtcaaacctaaccaagagttacactaggcacatagctttgttaggagtatattagtttatgaattctagttaagttagaaatccaatacctagttggattaggattcctaattggattagaattatagtttagttagaattctagtaatagtaggcgtgtgattaggagatataattagcttaattcttatattgttagtttaattcttatcctcgttttaggtttatctttagtcgaacttgtaccctatataaggggcctttatttcattaataatatagtttattttgagtttaaacctttacttgtgattgtttgcttgagaggttattaatcgaaccattaataacttttcaggattgttaagtttttagtgttaaacatcttaatttcaggagtgattttaagagtgtttagattcttgtattcaagtttcaggactgatcttgaatcaagaaatatccctagtttcgactaatatcataagtagttcgaattcttggagtcttttcttcaagattcatattcataacttgattatttagacttcttggttttgtaatcatatcaagtggtatcagttttccagggaggagaggatacaaagggttctctttgatcaaagaagatccaagggcatcaataagaatgacacttgcaataagttcgagtgatacaaacaacttcaagactcgatcttttgctaccaagaaccaatcttgacgcctgaagattgttaggacaaaggataagaagtgtttctacatccaagattgcattctttacgtccaagattgcgtcaagatccattctttaagttcaagaaaggagtagaaagcattcgaacactacttaaacatgacatccgagatggataagctggctatggccatgagtgccttggcacaatcacaaactgagtcacgcaaccacatgggtaggatggaggcacgtgaccgtggattgaaactagatgactatagtggagatggcaatccagaagacttgttggagtggatttgccaactaggcaaagtgagtgattataggggctttgatcacaagaagagattcaaggttgcttccattaggctcacgaagtatgctggaatacggctcgaaggattgcatgcacaaacttcttgcctaatgactatgaacaaaaacagttcataaggctcgcatcaataagccaaaacacacttagtgtacacgaatacagcatggagtttgacaaattagggcttatatgtgacatagaagagaaagagcaatacaagattgcaatgtacattaaagggttgaatcgatatatagccaagaagatcgaagtctcaacttatcacttctttgaggatgtgactaaattggctaagaaattcgaagagcatgacaaagaagaagggcctaagagttcttacacacctaagtatgactctagtgctaaagggaaatcaacagttccctactcaaggtggtcggaaagacctaagaaccccactacacctaaggaggacactagcatggagaagacaaaagtggccgtacctaaggagagtttaattttgtgttttatacatctttgcttaagagcttaacaattgaaactattaataacttttcaggatggttaagtttttagtgttaaacatcttaatttcaggagtgattttaagagtatttagattcttgtattcaagtttcaggagtgatcttgaatcaagaaatatccccttgttcaactattataattgatcttattcgagttcttggagttaatttcttcaagattcatattcatacttgattattagacttcttggtttagtaatcatatcaatatcattagcattaatttacccccagggagattaagaaaggattagcctaatcaaggcgcttaagaagtttttaggaaaaatcgtgcttgttaagcttaagaattgaacttctttcaccatttgcccttgattctcttgttgaactagaagatcttggttcatagtagatgctcctgcatcatagtagagcatttaattttaattttttaacatgcacgaagatgtaggtagtgtagtatatatcgtgagacgtggtttaacatatagaaagatgtagtttctgcatgatatagtgagtttttgcatgatatagtgaatgtctgaatgatacagtggatcgttccgaattgttgtagtttgtatgatatagtatttttgtgaatgatatagtgagtttcttcatgatacaatgggtttctgaatgatatagtggattgcttagaaatgatatagtgagcttttgtatcatgtagtaggtttctatgtgatataggttgttaaaagatgatacatgcttttggcctcatgtactctaatgttaacgtgaacccggtccttgcaagtcaattgcagttttttcaatattaagctatttttttttttttttttttttttttttttttttttttgtacgggaatatttagcatctttaccacaaacataaccatacgaatattatgcggaaattccagtctgaagtcttaacttttcaaaattaaaagcttctatattatttttggaatgaaaaaaaatgagctatggcatgttattttgaaatacaatgagtctcaaggtgcatagtggcttcaattctacgaataatgaatggactactgatttctaattttttgttccgggcttttgcattaggtaaccataaagatggactctctgtgggaagaactatttcctctggatacaaagctgcggagcttgtgatatcctatctcaactctacttaagatgcctaaatgatcgaggagactccgtaagtcctttctctgattctatctttgaactgagtggaaacacgactgtggtctaaagtagttgatgtctcagatatccagaaatggcgttagtgatattcaggagctgtccattgaccctttgattcattgttgcagtttactgaaagttgttagctggtctcagaaaaacgaaaggaaaaaagggggaaaacaaaaacaaagaaacgtagattgtggtgttaaaatcaagaattccagagatttgtaccttctttatcagttgaattgtttacagtgtgaatcaagaagttagctcgaccttcttttcttgtgaatggtaagatttcgtgatcatcaatacttgattgtgctgtttgcaacttcaacggtaagatttcctgatcttacagtttaattgcttgtgctgtttgccactt

SEQ ID NO: 11 - DNA, 1575 bp, synthetic construct
  misc_feature 1..1575: note = R126G mutated Beta vulgaris PPO2
  variation 378: note = n is any nucleotide
  source 1..1575: mol_type = other DNA
atggtaatgctatacgattctcacctctcaggagtctcaactcatcttcaactatcgcaggcatttcccaggaagaacccattaatggccaaagtgtctgagccgggtaaacccacttctgctaaaaggattgctgttgttggtgctggtgttagtggacttgctgccgcatataagctaaagtcccatggcttgagtgtgacattgtttgaagctgatactagagctggaggaaaactcaaaactgttgcaaaggatggtttgatttgggatgagggggcaaatactatgatagagagtgaagcggaggtcacgagtttactcgatgatcttgggcttcgtgagaagcagcagtttccaattgcacaaaacaaaggntacattgcgagagacggtcgtcctgtgctgataccttcgagtcccattgcacttctcaagagcaatatcctttcagcgcaatctaagctacaacttatgttggagccattcctttggagaaaacgctatgcttctaagatttctgatgagcatgctcaggaaagtgtgggtgagttttttgagcgacattttgggaaagagtttgttgattatctaattgatccttttgtcgcgggtacaagtggaggagatcctcagtctctttctatgcgtcatgcatttccagaagtatggaatattgagaacaagtttggctcactaatttccggattaattcaatctaaactgtctccaaagaaggaaaagggtggaggaggaaagccttcttctaatgaaaagacacgcatacgtggttcgttttctttccagggtggaatgcagacacttgttgacacaatatgcaatcagtttggtaaagatgaactcaaactacagtgcaaggtcctttcattgtcctacagtcataaggggatcccttcttcagaaaattgggtcgtgtcttctgtgtcaaaaaattccattgaagatcaacaatatgatgctgtcatcgttaccgctccaatcagcaatattaaagaactgaagattctgaaagctggagttccattttcacttgacttcattccagaggtgagttacctgcccctctctgttatgattactgcgtttaagaagaccagcgttacaagacctcttgagggcttcggagttcttatcccttcgaatgagcaacataatggactgaagactctcggtactctgttttcatctatgatgtttccagatcgtgctttctccgatatgtatctctatactacctttgttggaggaagcagaaatagagaacttgcaaaagcttcaacggatgaattggagcaaatagtttcgtctgatctccaccagctgttgggcactgagggaaaacctacttttgtgaatcatttttactggaacaatgcattccctttatatgggcacaattacgactcagttctgagagcaatagaaaagatggaaagagatcttcctggacttttttacgcaggtaaccataaagatggactctctgtgggaagaactatttcctctggatacaaagctgcggagcttgtgatatcctatctcaactctacttaa

SEQ ID NO: 12 - protein, 524 aa, synthetic construct
  REGION 1..524: note = R126G mutant protein of Beta vulgaris PPO2
MVMLYDSHLSGVSTHLQLSQAFPRKNPLMAKVSEPGKPTSAKRIAVVGAGVSGLAAAYKLKSHGLSVTLFEADTRAGGKLKTVAKDGLIWDEGANTMIESEAEVTSLLDDLGLREKQQFPIAQNKGYIARDGRPVLIPSSPIALLKSNILSAQSKLQLMLEPFLWRKRYASKISDEHAQESVGEFFERHFGKEFVDYLIDPFVAGTSGGDPQSLSMRHAFPEVWNIENKFGSLISGLIQSKLSPKKEKGGGGKPSSNEKTRIRGSFSFQGGMQTLVDTICNQFGKDELKLQCKVLSLSYSHKGIPSSENWVVSSVSKNSIEDQQYDAVIVTAPISNIKELKILKAGVPFSLDFIPEVSYLPLSVMITAFKKTSVTRPLEGFGVLIPSNEQHNGLKTLGTLFSSMMFPDRAFSDMYLYTTFVGGSRNRELAKASTDELEQIVSSDLHQLLGTEGKPTFVNHFYWNNAFPLYGHNYDSVLRAIEKMERDLPGLFYAGNHKDGLSVGRTISSGYKAAELVISYLNST

SEQ ID NO: 13 - DNA, 37009 bp, synthetic construct
  misc_feature 1..37009: note = R126L mutated Beta vulgaris PPO2
  variation 3684: note = n is any nucleotide
  source 1..37009: mol_type = other DNA
tattccatcgaatgtagcaaattgactgtccgttgcaatttcggagtttccactcgtcgcatggtaaatggtaatgctatacgattctcacctctcaggagtctcaactcatcttcaactatcgcaggcatttcccaggaagaacccattaatggccaaagtgtctgagccgggtaaacccagtaagtcaaacattcgaatcacaactcaagcaaatttgtcttgtttgcgttatattttgctcatttcagccttttttgtttttccgacctttgcatactgaatattgtgtgtgtgtgtgtgtggggtttcagcttctgctaaaaggattgctgttgttggtgctggtgttaggtaaattttcgtctcttgcagagtttttgagtcatttgggaattctatgtgaaacttgtaactcccttcagtccaacgaacgcagtacaattttctatcaaatcatggtcctaatttccaattttccatatatattgttggaattatattgggattgtctatcactattaatagtattaggatcaattgtagagaagcacagaaatttttgggatcgaaagaatatctggattgccacattaacagcagatataattcttccaattggtttttggttcttcctaccttgacttgtctggtcaaacattataaactttaacctttaatatccattaaagtaaactataggatttttttgtctaaaacatgcttatataacatgaaatttgtgagaaaccaccttatatatatttttttgcgaaaacaaaccttaaacaaaattattatcgtgagaacaaaccttatgccaatttcgatcattgacccaaggttttggcattgaccgtgtcatgaattttgttgggtttaaaaagtcatgtgtcttgcatacgaaatggtaaatgcgggaaccttgggtcaatgtttggaatccgcataaggtttgttctcccaaaaaatgtttttgttcaaggtttgtttttgcaaaaaaacttatataaggtgctttctcagaaatttcatgttttataaagtagtatttgacaaaaaaccctaaaatatattatagaattattattgactaaattgtgtaaaaatgtactcttctaaaagtacattatagtattttagtggaacatttgcgagaaactactttataaatacgatttttgcgagaaatttcctaataaaaaaatgtgaagtgcaaaactatcttattgataattttctactccctcaaatccaaaatactatgaagtctttcctttctggtttgtcccagattagtttgtacgcttccatctttggtatgatcccacttttattatacttattagttttacgtgagttccttactctatctcttttaacaaaaatactcaactatctctatccaataaaaagttccttactagtcctatcacatctgctttttaataaaataacgtttgataaccacacaacttatatccttaaaatacacgttcaaccaagtgttgagattaatttggacggagggaataaatattttttgaggcatattggtagcagtattcggattccgataggttgactatgtttccaatgttgaccaacacttgccttgcatgtaattctaactttgctcttttttattcttcatttccctcgtattccatatacaatgtttagagacccattccttcctcttctcttctttcccttccttactatgctttgccataatcttcctcaaatgagtgcaaattaatttgtcgttgatgtaggccaactgattgtagcacatcttcatagttcatacctcaacacactcgtaattatattataccctacatgttaaatggctcatgaagctttattttatatcatacttcctccgtttcacaataagtgtaacacttttcttatttggaataatcacaataagtgaaaccaagctccaaatggtaagaaaagttcactcttattacaaatataccaccaaaaagtaagaggggatcacaacttcaatacttcttcactctactttattgtggtcccaactttctctctctaaattccttggtaactccccactttctctatgtttcacttatggtgaaatggaggaagtattttgtagtggtatttagctactaggccttggatgatatacaatcatacaatgtatttatattcacgataatttgctgcccaccttgattaccatgatttccaccaattttatcaatttcagtacttcaccaccccgaatttatattttttatttccaaccttggtatctccatttgtctgagtgcccgatccatttgtatcgcctccagaattgaagaagcttcctgcagctagacaattaggaaggttaaaaaagtttggagatggtggaggatagccataataatcattgttgggaggtggaacttggaaggttattgtagggttgaagtccttgatgaagaagaattgagttcaaatgagaggaaaaaggagcagggaagagggacaataagaaaaaaaagggtaaactaaaatcacgtgtaaggcatgtgcagatcaacatcagaaagcatagtcaacctactggtattagggcactgatacctttttgggtcaaaatttttttacaaggtatttcatgaggtagttttgtccatttttttttttacaaggtatcgtctcattttttttttatcatttagtttctcgcaataagtgtatttcatgaggtagttttttccaaaatttcctcatttattataaaatacctcatcttttccataaataatgcaatgtctagacttttacgctgtttacacatgctcctttgaccatctattgacacacaaggaaaaatagagtagagtcatgcaggatcttgttagatttttctcgatatatactttcaaaagatcaatttttttataattttttttttgaggggattttttttttataattatgtacttatcaaaggtcaaagttgtgcaccgggaagcataaaactctatgtgttgcaatttacatggaaggggaggagtataataagagaaaattatggtaaaaggttcattcctggagatcatgagaaaggaagtagaaagaacaaaaaagaacaatgggagtgcttttcaatgtttgttgtacgtagcatttattcatttgctataatgttttgtgacattgtagtggacttgctgccgcatataagctaaagtcccatggcttgagtgtgacattgtttgaagctgatactagagctggaggaaaactcaaaactgttgcaaaggatggtttgatttgggatgagggggcaaatactatggtaatgtttttgattattgcaggtcttgcactttagcgcacaattaatttctggatttttttttgtactgtggtggttatggtcatcaacatgtctcacccactgtgcttgcagatagagagtgaagcggaggtcacgagtttactcgatgatcttgggcttcgtgagaagcagcagtttgtaagtctttcattatctgaatggcacatactttatttcgaaagattgtaattgccttttctttctagatggcttcatcttcatgttgctttctgattcagtttcgtggctaactttccaagtttgtctgattgctaactctgtcatagccaattgcacaaaacaaactntacattgcgagagacggtcgtcctgtgctggtaagtttgcttgttttacttttgacctcttttaagatctttcaactctggagcctggaaacatggtgatgcaggaggcaagttctctctattttacatcctttcttctctgtatcttatgacatttgcctcttattctgtgcagataccttcgagtcccattgcacttctcaagagcaatatcctttcagcgcaatctaaggtcgttttatgttaagacatacttgatgctgagagtttattgaattcttaaccttcttcttattttttttttatttttttagcaaaaggtaagtatattgcatttaccaaaaaacagtatgtacaccaccacagcagccatgtcagaatctagaaataccaccgaaaaaatcctacacccaaccagagacagttatattatatcctactcctaagtttctgtacccaatttacatcaatattggtccatttacaagatatttttataattcacagaagcacatcagttttaattagtttaataatgacctctggatgaataaccaactcagaccatatagccttattcctggctttccggaagttgtacgccagagcagcaagcacagcaatgcaaacctgtttcttatacctccttttatgtgtcttagcccatctcttatagctagtgaagatacagtcgtgtgcacaggattgaaccccaatccaactagcgaaagcctcacaacattatgactataaatacatctgaagtataaatgctgcacctttttctcctcttgcctgcacggtatcagaacaaatcccagctttagctaacaattccctggttttcagtttattcaatgccatcatgcaagcaatgaaagaatgttttggaacattcagtttgttccaaacacagtgagagcaagggacctttcctgcagttccacttagccacttatatccctgactaatagtatgactctttgcaccgtaaattgatttcaacttaactttttcataagcagtgaattgtgtgttgttagagtgtctagctgtctaggagattgggagaaaaggagggaccaaggagatagaaacacacctttgtgtttctttgtgtatttactttttagggtgggtcacgttttctgagaaatttgggaaaaggaagaaatagtaacacactttcccatttgtataacctgtatactggagctccaatataatttgcatttttttttgagctgcaagaatatgttgacaaacagttattgcttcttcctcagctacaacttatgttggagccattcctttggagaaaacgctatgcttctaagatttctgatgagcatgctcaggaaaggtaatgtcaagacatgtgttacctcgccttaattttcgttccaggaggtgagcatgcatttagaactaaaaggcacaaagactgttggtggtcttgcctgttcaaatataatggagaggagttttcgctacatttaccctctcttgaagtggggttgaaatatagcatcaagttgaatgcttgattaagtttaaaggacttgtgtaactctttttctgtttactgtgattacatgacctggttgattaacataatggtctgtttatctgtagtgtgggtgagttttttgagcgacattttgggaaagaggtaatggtttaccatagtatttctgctttagtggtaaattgtaatgttgctgataattatacttcgctgcagtttgttgattatctaattgatccttttgtcgcgggtacaagtggaggagatcctcagtctctttctgtaagtgaacattttgtgcttcactcccaattttttggaggctggaaatagattcttttccagttgttctgtcaaaaatagatgtagctttattttgaatttgaagttcccaattgttcattttgactattactgattattgctaagagtggcattatgctattatgctcctaaaagaaaggtgaattttgacctacatatagtataatgtatcaatattggtttaattgtttgttcttttgttccttttggtgctcatcttgcgccttgttctcatcgctcgttttttcatgttgcacttgatttaaatttgctcagcttaacttgtctttttgaatttatattacttattgctatattttactaatttcgttgaaactaattttttgctgaacttttcgttttgttgaaatcatttttctgaattaacttgattttcctgaatagaattgaattttggtgatcttaccttttctgcagccttttatttctttcttgtcctttttccaatctcatttttttatatttccattgtgttgacatcttatcattaactgtgcagatgcgtcatgcatttccagaagtatggaatattgagaacaagtatggaccataagacgtttattttaatcgacatgtatgtttcttagtttatacatatattaattctgtggtaaaaaaaccgaacaagaatatctttttttttttctatcatcaaaaagggtgaatatatgtagaggaaaaagatttgaatcaagatattagcctaaagcaataataatgttagtaatagctttaataacaaattcaaaacgtacattaatgaaccgagaggccggaaaatagttaaagtgaccactaagagaagcgaaggattcatgatgggttttcaacccagtagggcaaatttgttcaatgttctttacaaatcaagcttattaccttgtgggtgtttttgctagagatgaatgatagaattttccctagttggaagtcttttttggttactttatgggagctagtgatgtaatttgtttcgccttatggcatttcctaacatgtgcttttgtgatgtattgaagctttttttttgccttaatttatgctggattttaattttgttctttgtttcatttttcttgcttttgaaaaaaatatatagatatgtatatattaggattggtcgaggattttgagggaagggaaagacctaagaaaacttggatgagggtgattgatagtgatatgagtctatttgggatcgaagaaaatattcctttggataaggtgtagtggagggttgagggagcaaatttatgcagattagcttgacttaaagtttttctttttgattatttttcatttacttgtgttttgcaaacatttactcatgaatgatgtaaacttcttcaaccaaatctctggaaaaaaataatctacatggaaaaaacattattaatgttaacttgacagagatcccatccttgtgaagcagctagcaattaggcatctaacaattgacattttaatggacaggatagaatgtctcttgatagtcaataccctctgtttcattgtatcccatagctactaatctagtttgtatctttccaaagaaccattattttgaagtttcaccttgaacacccattttgaaccaatatgtttcttgcccttggggagaggggctaattgccatgttttgatgcggatgcaaagacacttgttctacctgagcctattgacttgatcatggatactctagggtttgaactcaagggaaagaatcaagtcttggcatgtgtggtgacatggcgtggggatggagtaaagaagagtcatagttctgttaggatatgttcttgcttgctacatagaatcgtagttctgttaggattgctatgatattatatctagtagatagattttatagttaattaggataaacatgtgatgatcatgttataataggcatgtgattagaggataggattagcttaattcttatcttgttgttagtttaattcttatcctagttttatgtttatcttagtcgaagttgtagccatataaagggcgttccattcattaataatacttagttttgctttgtgttttaaacatacttcttgattattgtttgcttgtgagctaactaatcaaaccattaaagacttttcaggagttttagtgctaaacatcttaatttcaggagtgattttaagagcgtttagtgatcttgaatcaagaaatatccttgttcttgttcgactaatatcagtggttttgttcgagttcttggagttaatctcttcaagattcttattcaacttgattgttgagcttattggtttagtaatcatatcaagtggtatcagttttccagggaggagaggatagataggattctctttgatcaacaaagatccaagggctatcaacaaggttcaaacattgctgcttgttcaagacttgatctttttctaccaagatgcattctttacgtcacaaggtagtaataacaagattaagagtggtttttacatccaagaatcaatctttcacgtccaagatttcatctttcacgtctaagattcattctttaagatcaagaaagttataacaagcatagaagaacacataaccatggagtccgagatggacaagcttgccaaagctatgcaagcacttgcaaagtcgcaaactgaatcacagagtcgactcaatgagaatactaccacaatcaatgggattggtagtaacatgaataggttggaggcacgcatggatgccattgcaaccatcatacaaaagaagcttgatcggaatagtgccaacttcataggtgccaattcagaggaagagttggcagaacgtgaagaaagatcatccaagactacatacaatgatgatcgtggcttaaagttggatgactataatggagatagcaatcgagaagacttgttacagtggattcgacaacttgagaaggtatgtgattatagaggctttgatgacaagaaaagattcaggattgcctccataagactcacgaaatatgctggaatttggcttgaaagcttcaaggcacaacgagccaagaaaggtaaagaaaagttgtgtagttggacaaagttgaaagttcaagcttaaagagaagttcttgcctagtgactatgaacaaaaatagttcataagactctctactataagccaagacacgcttagtgtacatgagtacaccatggaatttgacaagctagggcttatatttgacatagaggagaaagaacaatggaagattgcaagatacatcaaaggcttgaaccgccacattgccaagaaggtggaagtatccacttatcacacctttgaggatgtgacaaagttggctaagaagtttgaagaacatgagaaggaagagaagcctaagagttcttacacgcctaagtatgatactaatgctaaggccaaggctagcttcctactcaaagtggtatgaaggacctaagaggctaagaacctcaccccacctaaagaagacacaagagttgagaagcctaaagtcgtcgttccaaaggagaaatttgaagagatgagaaagtgcttcaagtgtcaaggaaggagacacatagcaagcaattgtcctaacaaaagagtcctcaccatgagacaatacctagctttgcaagaagaggaggatgtctattagttcgtccctgatgaagagcaaacttaggggaagaagaggaggaggatgcttttgctgaggatgatgcaaggctagtaggggtcaagaggcgcaccttacatgtcgaccatacacctagcatggagcaaatggaaaaatcttttccacactagatgcaaggtaggtgactatatatgtaatggtataatagatagtggttcttgcactaatgttattgtatctgaggtagtgtcaaagctaaacttagctacaagggcacaccctaagccatacaagttgagtttgctagatgatagcactggcatgagagtaaagaaacaagctttgatttcattctctataggggttataaggatgagttatggggtgatgtattgcctatgagtgcatgtcatctcttgcttggaagaccattgcagtttgataaaaaggtcatccatgagggggactctaatgtgtactctgtgttggttggttctaagagggtatgtttgcatcccttagctcctcattcagtggcgccaaagcaaccacctaagacaccaagttactttctatcttcaagggagttcgaacaagaggtggaggaagaaggttgtgcttatgccttgattgtaagacatgctgccacaagtgtcaagactactagcaatgagaagctcgaagccttgatgaaagagtttgaggatgtctttctagaggaactacgacccttgagaggcatagaacatgctgtagaccttgtacctggcgcccctttgcctaacaagcctgcttataagtgtgatccagtggcatctagggaattgcaacgccaaattgaggacctaattgaaaagggctatttaagggagatcatgagtccatgtgttgtgccagctttactagttcctaagaaagatgacacatggaggatgtgcatagatagtagagcagtgaacaacattacagtcaagtaaaggtttcctatgcctagattggaagatatgttggataagttacatggggcatcaatcttttctaagattgatcttcgaagtggctaccaccaaatgaggatcagagaaggtgatgagtggaaaacaacattcaagaccaagcagggattgtatgagtggatggtgatgccatttgccttatgcaatgcgccaagctctttcatgagcttgatgaatgaggtacttcgtccgttccttaacaagtttgtggttgtttacatagatgatatacatatctatagccaaaatgtggaggaacacttgttgaacttgcgtagcttattcatgaagcttagagagcaccaactctatggtaagattgatggcgacgaggttgacgggggattatggcggcagtgaatcaccctctttgccggtcactgaaatacaacctgaggtatctttaaattctgtaattggattgactaacccaaaaactatgaaattgctgggaaaaattgctggatgtgaagttgtggtgatgattgaccctggggcaacccataattttttatcactagctactgttgagaaattagctattcctgtgtcggaatcggaaggatttggggtttctctaggggatggacaggcggtgaggggtagtggaatttgtagaggggtgttattgagtttaaatggtggagttgaagtggaaacagattttcagcctctgggtcttggtaattcggacgtgattttgggtgtacagtggctggagacgttggggacagtggagagcaattggaaaacacaaacaatggggtttgaaatcgagggtgtcaagttcactttgaaggtgacccatcactggcgaggtctcgaatctcactcaaagccatgatacgtaccttatgtaaagagggtggaggtttgtggcttgagttgaaccagattgagcattatcaggagaaaacaccgcattcatcagccttacctgaaattccagttttcttacagagagtccttacccaatttcagtctgtgtttgctacaccagaaggcttaccaccgataagagaacatgaacatgcaatagttcttagagaagggtgtaatccggtaggggtaataccgtaccgttatccacagttccaaaaagatgagatagagcgcctcatcaaagaaatgttggcttccggaatcatcaatccttccacgagccctttctcgagcccggtgatattagtgaagaagaaagatgggtcgtggcggttttgtgtagactatcgggccctcaataaagaaacggtccccgataagtatcccattcccgtgattgatgaattgttggatgagcttcatggggcaacacttttttcaaaactcgacttaagggccgggtatcaccagatccgggttaaggccgaagacactctcaaaacagcttttcgcactcatgaggggcattacgagtttttagtaatgccatttgggttgacaaacgcgccggcaacgtttcaatcccttatgaacgaggtcttcaaaccattcttgcgcaagtttgtcttggtatttttcgacgatatattggtctacagtagttctgccaggaacatgaggagcatttgaccttggtgttgcacaccctagcagctcataaattgtttgtgaatcagaagaaatgtgattttggcaggtcggaagtagcatatatggggcatatcatctctggtcaaggggtggctgtggatatggagaaggttcaagcgatggtggaatggccccttcctaaaaacctccgggaattacggggatttttgggccttacagggtactaccgcaaattcgtacttcactatgctcatatagccaagcctttaactgatcaactcaagagagatgcgtttgggtggtctgaggcagcaactcaagcctttgaaaagctcaagaaggcgatgatcacatcccctgttttggcaatgccggacttccaagagttgtttgtggttgagaccgacgcatccgggtatggtctgggggcagtgttaatgcaaaacaaccgacccattgccttttacagtaagttgttaggtgcccgggctcaattaaagtcgatctacgaaatggagttgatggccatctgcatggcagttcagaattggagatattatctgctgggtcgacatttcctcattcgtacagaccaacagagtttacgtcatctcactcagcagcgagaagtaagtactgccttccaacgttggatgagtaaacttatggggttcgattttgaaatacagtttaagccggggtgtgccaaccgggtagctgatgcattatcccgcaagacagtgggagaggttgaattgggtgcgctgatattaactcatggggtggactggaccgacttggagcgtgaaattgaaggcgatcctctgttgtgcaaaattaaacaagacttccacgggggtgctattactcctgtgcacttttctttggtggacaacaagctgttgttcaagggtcgatacgtgattcccagctcttcggtttttattcctaccttgctgcgagaatatcacgattctcccattggagggcattcgggggacctcaaaacatatctcaggatggctgccgactggtattggaggggcatgcgcaaggatgtggcgcggtatgtgcaacattgtagcgtgtgtcaacaacaaaaaatgtctcaacagatgccagggggggtactacaaccactccccataccttcctcggtttgggatgacttgtcaatggacttcgtggaaggcttgccatcttccaagggggtaaacaccatcctcgtggtggtcgatcgtttgtctaagtacgcccacttcctcccactacgtcatccatttactgctgtgtcggtggcaaatgtgtttgtcaaagaggtggttcgtttgcatgggtttccttcctccattgtttcagatcgggatcgaatttttatgagtgtgttttggcgggaattatttcgtttacatgacaccacactcaaacgaagtaccgcgtatcatcctcaaacggatggtcagtccgaaatcgtcaatcgagctctggagacttatttgcgttgctttgtgggggaatacccgcgctcttgggctcagtggcttgggccgaattttcatataatacttctcctcatctctctaccaaaatgaccccgtcaaggtcctttatggtagagaccctcctactgtgatacgggttaatcggggagcctcacctgttgaaagcttggaaaacatgctccaagagcgagacgcagtattagatgccttgcagattaatctgattaaagctcaacagaaaatgaagagtagtgctgatgctacaagaagagaggtgcattttaaggtgggagatcgagtgtacttaaaattacagccttaccgtcagaaatctttggcttaacgcccttatgagaagttagccgcccgtttctacggaccatttactattttacagaagattgggcaagctgcatacaagttacaacttcctgtttctagcaaggtgcatccggtgtttcatgtctcccaactgaaacaggccgttggttccattcccgtttcagccactattccagagcaattgtcttctgacttggagttagaggtggaacctgatgaactcctcgatgttcgtagtgtttctagaggccagcacacttacttggaagctctcattcagtggcagggattaccatcattcgaagctacctgggaagatgtggctgctttccatcaccattttccatccttccaccttgaggacaaggtgaaactttgggggggtggtaatgtgatgcaccaaactaccactccactactcacctattagaggcgtaagaaaaagggggtaaatcaggaatagtttacaaattctgttgaaaggaatattttgtaattatgatgtcagaggttgttagcaaaaaggcagtagagtaacaataaaaaggggaagggaggagagaagaaggtattgagatttttgtaaggaacttggcccttgggagagttgggagcctctcgaaagctcaccattatcttgtgaatattttccttcctggttatatacaagaaccttcctctgtcaatttcttttctctctaatcttatttcttattctgttttctggttgccattgtttgaagttgcttgttgtgcttgagtaaatacgtgaagtggtgaaacccatctgaattcatcacatctattccaagtggtataatacaagcttgtaatccaaatctaatgagaaatctaagttatgaagaatttcaaaagaactaagtacccttgttttggatgcccaaggatttacttgccgctcaagttaatgctcaacgtgcaagatacaacctctttagtatcccaaggtagtttccataagaattaattgagctcaaatcaagaacaatatttttatgtattaatgtgaacacttcctgaattatattagatatatggtctgaaggttggaagaaagattagcttttaattttaagtttgagatagtttttagaatcgaggaaagattagctcttaacttgtaaactaaggattgctttataagtaaaacattagttatggaactcttaaaattggttttgaacatttctagttaaaaatcccatgtaattctcccaaactagcttaaaatctcacatttcacaagctaaggagagacaaatggcgttctcttgtgaaacaatctaaaattttcattaggctactgttttcaagtatttatatgttagaagtgccgcatataggtacataaaataagtttacaaacacaagtaggaataaggaaaactaaaagagaaacttcagccatacaaaaccggctgaaatcagctactactttctactttctagcttcaaaatctgattgcaagtctcctttaagccaatcaccaatgaaaacctttcctccacatgaagtgtgctcaaatcaagagaagaaacccatcattcgcctatagctacctgggtcagatgaagatacggcaaaaaaaacgctggaaatcagtgaaccaaaataagcaccaattggatgctttctgtccttgctacattttcttctcataggactacttcaagccatacatgaataagcagttagatccagctcctagcatccatttgatcgtacaaatgagctccaaaaagataagtaaaaccaagcagccaaaacctaattaatactaatgatgaattagttgaatagctaatgacgatgaagcaacactttagtaggaatagtgttaattatgatcaatgctacttaatcttctgattaatttttggaaaaatgtcatatctaccttctgtatacacttattcataactatatcgtattattattatttttaaataactaccttttaagtaccaaaacctaagaaatcaggcacttgatggattccatccaaagatccatttggcggggcccactaactgacttttgattttttgcctttcctcttttggttaatctcaatggttcatcaataacaactcaatcttctccccatttcatcaaatcatccctaaatcagaactttttcaaattcacccaaatgaggttatggaaacctctaccaagtttattcgaccacttttagtctagctcaaagttttacacttgcttcaaaaactaagatttattaactttagaaattaggtttttatttttattttttatttaactttgtaacaatcttaaataactcaggtgctttctagagtttggctttaattgtttttcccttggttatgtgaaagaagtatgactactttctccaagactaaagtagagagcaaaaaatgcaattctggaatttcttgcaaaagaaaaggaacgagttaatgataatgaaaaacaaagaaaatgatgagaagagaggagctgaatcaatcatgatcatgtattttaaagttttttttgctattgaagtgacttaagaagaggaaagaggatgagtgaagacaaacaaaagaaaggataaatagagggaaatcttgggcttagaaaggtgaaaaggtaagaagatgagttagtgggccccaacaaatgtatctttggatataatccgtcatgccactgtttggggcttgcttaagtccatacattacttcactaattttacaaaatttattttcttgaccaagaactgaaaaaaccttcagtggtgatctattaggttttggaagttaaaaggtagttatttaaatgtttttaatataaaaggtagttatttagatatttttaatataaaaggtagttatgtgaataaaagtgtatataaaatgtaattttttgacatttttgccttagtttttcttgctaattcaccttttcaacttgaccaagttgctatgaggagaaaacgagcaattattaagcaaatcgcaacactagcattaatccatggcccatgaaactctccataattagagattggattagcacttagtagaacttcttgctcctgctccaggtttccattacttctttatctaagtgcatcaaaaggttgttgggttatgaaaggtggtggttgtgtatagtcattgtcaaaatgttgttaatgcactctatttagaggatgagggattgaatagttttcacctcgtgacctttcattcctttttaaaaaaattgataatgtgtattggtcctatgactgtatgaatggtaataagctatctcatgagctgttactatcttcctcagagtctaggtagaagggtttgggctgataattttctactatgtgcaattagtttgttggatttggatatgctagttgatataggtcctttcccttgggccttctcttaatataggcctacagtgtgattgaagataaatcttctggagaatataagaacaatgagatggattggttagaggttgatttgttcttttggtgtaagactatttcgggttctctattggttatgttcagacgccagaatatgtgttggtgattgttttccatgaacatactttatccgcagagacatttttcttttttcttcctataagattatatttgtttcctctcttggtgctcatctcagtgtctctactttacgttaaactgttgacattacttgacaatgcgtatatttgtcgcatggtgctcttccctcactccacgtcgaccccatacatcaaaaaatgccattaaagaatattcgaactcacaaccttgtgttgaaagaatggaatccctaccaatgactcattaattcattttctctttaagaaataaatgatttcctcacaaacttttaggctttaagagcccaaaagataaaaacataaaataagatagacatcaacgtcaagattagccttaaatgcacaaagcacatgtcaaatgattgataactactcacgagttgcaactctttgggcgttgcctaatattaattggatctcttttaaaaattgttggtggttatggttggtggagaggaccatgtaacttttagctggtcacaactggtaatgattgtcacttttactgcccataaaaaaatttaaactgttgaatatgtttctggcagtggatctgacaaatcctttacaagttggcgtccattttgttttgccatgtgactcaattataatacgtgagttttattatccaccaggtttggctcactaatttccggattaattcaatctaaactgtctccaaagaaggaaaagggtggaggaggaaagccttcttctaatgaaaagacacgcatacgtggttcgttttctttccagggtggaatgcaggtattagcatgtagctttcattctgttaacatttgtggttcttccagacatacatccaatgctttttttttttcttgctataaccataaacattcttgtcatgaacattctttaatactgttgctgagcttagtgtattcgttcattcatgtaatttcctctcttgaggttaaaatggcatacagccttacaacctatatccataatgctccttagagtagaatccctaggttataacatagtaccacttatcaaaataaacatggcacacactgcaggacaagaagtaaatccacctagagaactgagcacctagtagtaaaagcagcgatacattactaataacagtagcagggccataagagtagtaaatgggcctcatttcaacactccccccgtaatggtgagagagaagaagcagtctgaactcccagcttggagagcaaaatagagtgttgctgaacagggagaaccttagtgaaaacatctggcacttgatcttgagatggaacataggtaggctgaataaccccttcttcatttgtattgtccctcaggaaatgacaatctatgtctacatgcttggttttctcatgatgaactagatatgctgctatggcaagagcagcttggttatcacagtagataggagtagcactggactttttaatgcgaagatctttgaggagttgtttgatccacatcacctcacacacagcaagagccatggatctgtactctgcactgaccacaagaaattgcctctttgactttcaagatacggggggagtcaccaaggagcacacaaaaccagatgtagaatttacaacacccatcccattcactatcacaaaatgctgttagttgagcactagacttgttcgccatgagaattcaccctgttggcagcttgaagatgcacattagtggggcagtgcataaatttgcttaaatcatgtatagtgaaggcaatatcaggcattgccttgtaatagtgagataaatgagcttccccatcaatttttgatacacatcaggttgttgaagaggatcaccattgtcagcatagagcttgacatgtgagtccatacgaagcctcaatcgtctgcaatttataaaaccatattcatcaacaagacccatcacatacttctttagagataaaaacgatacttcactacactgatccacttcaatcctcaaaaaatatcttaggccacccatatctttcatgtgaaattggccagcgaagaaactctttgcttcctcaatagttgctaaactattgccagcaagaatgaggtcgtccacatacaccaatatagcactgaaacagtgagagttttgcttgaagaatagagagtagtcacacttggattaagtgaatacattttgctttaaagcagtgttagcttggcaaaccattgcctcaaagcctacttcaagccataaagtgacttaagcagcttgcacaccttagttcatttggtgtcacttctgccatcagtacttagctccccctctccttgaactttgatcctgttacatgtttcactatatcctggtgatagcttcatgtatacactatcctacaattcaccatgcaaaaaagcatttttaacatccatttgtttgcaagaaccaaccctctaaggatgcaacaacaagcatgtggtcatctttgctacaggggtaaaagtctgctcataatctattccatatctctgtctgtcacccatgattacaagccttggcttatgcctattatttgtgccatcagtgctgtattttgttctgatccatccatgtgagggatggctcatttctacaaaatcctagttccgttaggatttgtgttgttttcctaattctagtaggaataggactcctaaaatcctaatcctcctagttctgttaggagtttaaaagttttagtttgattgtaattctagttgtgttagaaatccaaatcctagattcatgtcacgtatggttagaacatggctagtaggataatttgtcttgtgatgtccatagccttggcatttgtggcacctaactttcaatagcttgtcttctgtctccttttctttctccttctttgaggaatcaacgtttttagagctatctaaaccactagcatcaatattaggtttaaaagtgctaaaagatttcgaatagttcttacttgcatacaatttctttttctagtttatgtagcgtcaccagggaacaaaaactcggccgttccgttctggaacggccgctttgtaacggatttcagagaggccgttccgttaaataccgttctagaacggtgatttggaattcacaccaaactcggcgcgatagcgttacgtaacggtgtaacggcgttccagaaccgttacaatcacataacgtccgttatttgaagaagaccagttcttttggtggaggaagaagaagagccaacgcaagatctatagatctgagttaaaatttgaaaataaaacatgtttttttatttaaattaaagcttacagaggatgtagaactcaaattcgagtaaacccctcctttaatttcattaggttactgcaaatcgaaccctaaattgcaaaccctaatttcgaaaaaaccctaatatgcattgggatgcaacgctgcttctccggtcatggcagagaaggtcgacgagtcatcttcggctgcttttagcactgtagctgccggtggttggcttgtttgcaggttagtgcttgctggttttctttctctcataccgatcatcttcttcttttctctcttctctttttcttttttattgtgtgactgccagtcacgtgataattgcaactcataaagtatctctttctctctcttcttttcatccctttttatttttctttcccttttagtttttattccctcacgtggaatcacctaattttcatccttttttatttttttagttacactcttacacagaagtatgttcaaatatcattatagtacctcaaatattgtatttataagagttttggacataatatgatatagaaagtaaaatagaagaaaaataaagtttaaatgtcacttgtgtgatttttttaaaaaaattcacgccgcgacggccgcgaaacgttctatttcccgttacaagccgttcccgcgataacgcgaccgttcccgcgaacgcgaccgcgaccgcgttttttttccttgagcgtcacatcttgcaagcttcttcaaaggtgagttatgtgtacaactccaatttctctccaatcccctccgtcctcatttaggcctccaaggaagctacttaaacattgatcttcaagttcatcaattttccaaagaatggataacttctcgaactcctttatgtaatcttcaacggacatattcccttgtttaagagtagaccattccatgtacaagctttgtttgtagttagaaggaacaaaacgtcctcttaacaactttttaagcttatcccaagtagagattttgggtttattagctttcacacgctgcctctttactccatccaaccaaatagatgcatatttggttaccttaagcacggccaccttgtatttcttttcttttggtgtctcttaatcccaagtagagcttttgcgtgtgaaagctaataaacacaaaatctctacttgggataatcttcttcttgtttccgaaacaactaattcttatggtagttaggaaagcaagaatggtttctaattcaatagggaatatattaattattattagtttaagttaaatagtgcacgaatctaaatagattattcgtctcaaaatctcacttaagtatagatttgtttggacatctgagggaagaagaagagagcgagataaaggagaattatcactcaatgaatccatatcccgagttttcccatttacttctttgaaagcaatatagttcacgaggtcttattatcagtctatggacataagagtaataatttaagggcaaaaactatgactttatgggtttaaactgatacatgttctgttaaactgatagatgttctgtgttaaaccgatactcatatattcctggttaaactgatagatatatgatttaaattgatacccgtctcagtcatgtcttggattgagacggtctgacacaagactttttgtgtattatatatctgattagaataaatttatcctgtttactaattattttatcttctccagacacttgttgacacaatatgcaatcagtttggtaaagatgaactcaaactacagtgcaaggtcctttcattgtcctacagtcataaggggatcccttcttcagaaaattgggtcgtgtcttctgtgtcaaaaaattccattgaagatcaacaatatgatgctgtcatcgttaccgtgagttttactttgcttactgctattgcaccaatctttcttcttttgacacactgataatggcaatgctgttgtggtttgaagccatgttatggggttttagggatatttatggagtctgatctaatatgttattggataaaattcagatctgtaacgtgactcaatgagattgaaaaaaattgaatcaagataatggattggaaaattaggagctaacctagggtctataagcgatccacttggagtctcataccaagcaggtattcgacattttaggtttatattgctgctatggctcatatgggagcctacatagggtctggtgcttattcctttttcttttgtctagttttggggctgcacatttctgttgtgttttgatatggatagccatcacctgcaattgcatggaggctgaactaagttctataggggagcaaacagtatctgttggaaatttattttcatattgtgtttttaaatgctataatccaaaatttgttgttcccctaaaatgcctaaaatacccttatgtaactgctccatctgtcccttaatagacttcccatttctccaatgcatgtttgccaatacacattttgtattgttaatatcaaaaattacatattagtaaaaattataaaagtttgattttcctaatgtacgcaatgagacgaatcaaacaagacgccatatgactatgttttttcttatacttcctatgttttttaataagtgacatgttttccttttagggaaatgtcacaataagtgacacatagctcaaagtagtaaaaatacttctcatttattacatctttgccattatttaattgtttcacctacctactttatccaatactcaaatttgattggttgaacaattggtcccaactttctctagactccttggtattccctttcccccactttctctctgtgtcacttattaaaaaatggaggacgtatattggaaaaaaattggaaggttttcttcacttatgaatagtggtaaaattagagatgggaaggctattttgggatggatggagtaatatttaaatttttaaaataatgtcattgttttagtgatgaaataaaattcaaggctattttttctagtaattatgttatctgtacatcaccacacgtatcgcgtgcatataagactagtttgatgatattccaacactgttcgaaggaagtcaggcatggaaccatgtttgcttccatatgggaaatattttgcttactctccttcaaacatctacctcattatcccagaatgattgatcgaatctaatacaaatatacaattgatcatatgccaccagggaattacatcaaattaaatttttatagaaggggaatcagtcatagcctcatagggaacgaataagtgatactcgccagtttctttcctggttacttttcctcttctcactagccatcctttatgtatgggtatgctgcatcattcctgccactggttgggactcccgtttgaactatggggggatgggaaagctaagccatcatcttcaaattgagtttcttgagaatgtaagacaccatctgtaagatgaatatagtgcactctatagtcaatgtcatgatctttatgggtttatctgctgaaataactgtgatatacccagctctccatttacaaagttttcctacatattaaactcttgcccgcaattctagaacttcattgtagaacttttcctacataagcatcatttgtcttttctgtagtaaaagttagaaagagctttattttagaacattcgtttttagttttctttgttgttgattactccgccacttttaatacttttatgattcaagtatttgacaaaatcatgtaatttaggtcctctgctgcatgcagtctataccctctctctctctctctctctctctctctctgtggttgtgtcttacttgttgagttactaactccagccattacataaagtaggctggcattatgatgagcaaattactcaagaccacatgttagctcctttttcttttctccttattctgaaaggcaaatataggtccatcttggtgcttctcatgtcataagtaagctgaccccctccttttccagggaataggacaataatccaaaagtgagggttttacatgttgggatttgtgaagtttcttattttacttaatagccgagtcagtgttacaatacatagtaccgtgttacaaaatagtatgtaacaccaagcatgtttatgtgcaaaattgtgcaagactttgttgctggcacgccaagggctgttttaatgtagtttacttattcttttaggtttttcagatgacaatcataaagggaattaggagtgtttttattgtagtcaatccctattgtgctacaacgataaaagaaaaaagcacaagactagaaggagaagtaatgtctaggaaagactcctcacctggggttgctagtcacctacacatcttagaaggcatcaaaccaaagcttattcccctcgactgttttcgggagaaaagaagacaaaattgtttctaacttatactttaccagtttcactacagcatcagaaagaagcaaaatatgctcccacaacacggcgaacctagctttccagatgtgataaaccagaccagcaaaatgattattttcactagagctttgagtctattttttcggtttttccccttcttcctggtaatgtcacgccaccaagccatcatctcaattttttgagatttgacgtaatcgctcaaatagctgagtaagacacttcttgctctaaatactaataaaaaagaggtgaatgtgggtctcagccatgttactcaaatcggataaagtgtctactcttattagggtttttgggtgttggactcatccatttttttttgtaaaatgtcaagattttggtttgaaatgagagattcaagtgtcgtgacatgagtcggcacgcaacacttaaacgtgtcgaagtaacagagggtctcagacaatcaactttaatcaatcacgaaccccaaaatttatgcaacctttgctcatattcagtctctgtaaagcactcaactgcagcacacccacccattcgcttcacctacagcaggagggcacccaagtaattgctatgatgagcgaattattctgttttgccttgctggaatattgctgttagatttgctgactcactggcagttaattatagtcagagaatgagaaatatcctgtagagagagaaagggtatcttttgtatttagctctataaatagctaaggaagggaagggcattgagagtttatgatattataataggagagatttagcctctcgaatgctgataggagcgtagctcttgttggattatcaatactactctgtttgctctatctatttctactcaggttccttcttgtacagtggatccctgattggatttacttcatcaaccagcagataaaattatttgtaggcacattgaaaccattccaaacctaatgaggccaaagtttatcacaaagaatataggagccaaatgtaggcaacagataagagtataattgccagaagttgaagactccaggtattgttcagaaaccttaatgcatatcatcattctgacactagattttccccggagccaactaacaaaaatgaattaaagagattaaggctatgtttagttcacctgaaattttctgatctgaacttatctgatctgatctgaacttattttttctgatctgatctgatctgatctgaaccaatctgattacaagatcttatcttttagatttttctcaatatataagaaaaaatatagtcatgtggggtcttgtttgattcgtctcaatgagtactttattaatattcaattattataatttttactaatatgtaatgaaagatataatgatttttaaatataagcatgatctgaactgatctgatgtgaacttattttttctgatctgatctgatctgattagatctgaaataagcaaaaataaggtgaactgaacatagcctaagcaacaattgagggaaaataagatcattatggctaagataagataaatatgtaatgataaaatcagagtaattatatcagttacactctcaacattcgtcagattgaggtttcctcccaaaatgccaacccacttttctgtattttcacgtccttctctctacccttctaggtatatattacatcagctgtaaaatttttgaaccaactagtagaatactgatctaccctcaactgcctcactttctcattttttctgggcctttttctctctagcacaagtccacataagtgatgcatagcagaaatataattccactagtcatcctcaatattgatataacaaacacatcacccacatattatcatttttaatcgctgcatgcgaggcatacttacccaccaatcaggatatgcataacagcgttcctaattccaaaaccaccatatatcttgggtttgcaactctcatccctagcaacaaggggactttctgaaaaagtggcagattccgcccacaagtagtttgtacggacacctttattatattattaatatcatatttcggcaacacaaattaccagcccagtaaaacatgaattgacatgagactaacaaggggcccaatctaatatcgtacgtctgtactaagcaatgtataaaaaaaagctcaaggtgcattgatgcaatagggatcctaatgtgcataggtgcgcctcattgaagtgaggcaccactaaggataaataaaaaagattgatgtaaaattaaattgtgcaccttgggtgcgcctcgatgaactttttttgtgtgcctaagtgtacctcaagtacgcctcattgatatcgcctcgcctggcagaaaacgagcttgaccccaatcgccttgctccccaccgcctaggcgtgcctcagtcacactttttaaatacattggtattaagtactcagaatggcaaaaagaaactttgggcattaattagacatttcactttttgtgcaactatttgtgacttcagagattgatatgttttctacattacagacttttgtgatggctgcatggtctccactgtcaaagaacattagtttaagtagaagaaatattgctctattaccttcctccctctacaaacaaaatcctaaaatgtggttatgtagtgccaattcaaacttgtagatgcatgactaatgctttcattatgctgtgggtttttatactatgattcatgtccaattacataacaattagctggagtcaggatatgtcacggaaattttaagcctggcaggatgattgtttatattttctctttttcggtgtttaagtcaaagtaaacttctaggctgctcttttataggctagttgggctgttggggagatctacacattaagtgtgaagaaatcttgtctaactccagtttggttgagaactgtaagctgtcataacatttgttgcatgatgaggccttgtgggattatcatgttagctgtaaactctaaacttacttgaaatctagtgttgtgtctccttatttctgtagtcaaaattgaaccttctgtacgtttttgatacctgcgactagaatgatggaattctgaattactgatactattacaaccatctgctaagaacgaagatgactcttagctaatttctcagcagatttagagaaattaagaagaattactaatgaatatttaaagagaaaactaccaagatatgattgtattgatgaaaaacaccaattacaacctaaccaacattcgagaggttggagctctcccaagtaaccatttctctcactaaacttatcaattttcaagatgccttttccattctcagttcctctatatttatactactccccttagcaaactacccaacttattccccaagtaaactaaagagataatatctaaaatacccttccccctacaataatattagttcttagcattaccggccccctaaacttccaccttgtcctcaaggtgggtcgtaatcatcactaaattctgggcctctactcgtatattcagtgtcttgcagcccttcaggccccaagcctaggttatgcagctcgtgttgcggctcctcctcatatagttctctggctggagtgagtgcctcaactataatgaaaaagtcctggaggtggggaaggaaggagtgtctgaaatggtgtggtgtgctgctggtgttatgggcttgtgcctgaaagttttgggtttaaagagatggagtggagaagagtggagaagtgactggagacgtaaaagaaggaatcataatttttgtaagtggtgggttgaaaaagttggtgggaagaattgtttttataaaatgtagtgtaatggtcgaaaaatgggtggagtaagtatggtttttggctggggatgtggtactgggttgaaaataaataggtctgagcttacttgtaaaattggcctcaacatgagcaggcccaatatcttgagccaattccccaaaagctggcaatagagcactcttaattgcattgttgtgggccatcgggctccaaacatatattcggaggagccggacttctttggtgatgtcattagcttggcccattgcacactttcccttaacagcctcaagatcttttcccacttttgtaccccaaccacgtggcttcaccatcctttctttcttgcttttgtcacttttttggcaatatacgagtttgtccttactaccctcatcttctaatgttggcttcctcaccaagcttaatttctggaattttgtccaccaaatcccaccacccatcgtcaacaccatacctatctacaccggccaagaagcctggtcctccacccgaattttcgccacagacaaagcctgaacaaccgtcagttctctcaccggagaagttcacaggtccaccacctgacccactagttgctgatccacccttcacaaatctccctcctctggctgccacaagtagtggttcctccgtaatactcatatttctcgtccaagagccctggaccaccaccggacccacttccaccggcaccaacttgttcaaatgatacttctctttcttttccaaacagcctacttggactggaaaaaccactgcgattgtagcctccgccagatctgtagcctagtgcacctaacgtgcttccaactgcaacccaatagggatggaaatggatgggattcggggagggtggagcatcacccgcatccgtcacccgcatccattcgctccacccgctccacccgcatccatccatccgtcacccacgggtgaaacgggtgggtcggtgataaacgggtggaaccatttagggggtgtttggtatcatgtttttttacaaaagaaacagaatcaagtaacaaaatccgtttctacttgtttggttctatgttgctcagactcgagtacccatgtccgacacgggtacgtgtccaagtgtccaactcagctattttctagaattttttatattttttaacccaaaacaaagtgtccaagtgtcccacccatgtccgactcccgaggatccgacacgggtacttgaggtgaaatgaagagtccgagcaacggaggtttggttagtgtgtaaagtaacaattaccgttacttgaggaaaacacatccccccaagttgtttccattcaaaaacctaaggaaacaaataacgtttcactcctcaaacaagaggaaagggaatgggttatatttatttccattccattaggataccaaacaactaataagggtaacacttattattatcctttcccctccttatcaaaatcctttccattccgtttacggtattcataccaaacacccccttagtatattttctaatgaaatttgtgatatgatatgcatgatataaaataattctatcaaaaatataaaaagtaagtaaacttacatgtacaacttaatagatgggtgatgggttggaggttaaacgagtgatggatcgggtgacgggtgaagaaattctcacccaccactcgctttccatccatttaaattaggtttttcatccatttaaaaaaccgggttaaacaggtgatgtatgatccatcacccatttccatcctcaaacacatcccgatttgtttactgcaccaccagatccaccagtataaccacccgaaaaatcatcatgccttctactagccttgtaacctgctcccggtgagaagcttcttccacaagtggtggtcgctggacctccatctccttcttccccaaaaaattttccatgacacccactcgacccttcatctgtgacaacctcttcttcgtccacctctgaagttttggggtcgtcttcctcctcaagctcctcttgaagtaactttaacttccgttggatgggagagaacgcttcattgattatcttcaccagatcttcttgaagtttctcgaaactttttctcacgttttcctctacctctttcgtgatttcctttccgatctccttcatttttagactaggagctcttgcgattccatggcagatttctttttttaaaacaagaaaatcaggcacttaatctcccagaatagtggtgctctgataccattttctaagaaccaagatgactcttagctaatttctcagcataacaacaaatttagagaaattaagaagaattactaatgaatatttaaagagaaaactactaagatatgattgtattgatgaaaaacaccgattacaacctaaccaagaggttggagctctcccaagtaaccatttctctcactaaacttatcaattttcaagatgccgtttactactccccttagcaaactacccaacttattccccaataaactaaagagataatatctaaaatacccttccccctacaatattagttcttagcaccatcaaactgggatggatggttttgtaaggttccaatttacttctccatcaaaatattttaggattttttatctcatgtattttagagtttcctcgtccctttttatctgataagattcttctgatgatttgattttatggtaggctccaatcagcaatattaaagaactgaagattctgaaagctggagttccattttcacttgacttcattccagaggtttgtatttttatagtggttagacatgcttcccctagttttcaaagtaaaagcatccttgttgtgacgatattttttcccttgtttttgtttttattattatcatcacttatttccattttctattttccatgctgataagatgttcatcaccataatcttgtggtatcagaagtgtttagtggagtttattcactacacatgcagttgttcttttgccatgaccgccattcattttctcgtcaaaacaaatctatgaagtttggttttcagactcatggttcttgtagctcttgtgaatttttttttcttctccttgcatgcattcttcaaattacatattgcatataccaggtgctctcctttattttatatttaatttttaaaattctatcatatattttttaatgtcaaacctcaaactaggggttcactgcatcttaggcttaccaggctaatatttctttacttaaccttttccctttatatttgctatcctcttgtgtagtaatcaccataagaagggtacaaactaaattaccctcccattcttttgtatcattctgaaatagtgtcacagagctttgatttttttgccctcatttaatctggcaaatgttctctctatttttttttttttactttcttttgacgggattctcaggcaattgttacggggagcagccagtcacactgtttctgtttattatgcaggtgagttacctgcccctctctgttatgattactgcgtttaagaagaccagcgttacaagacctcttgagggcttcggagttcttatcccttcgaatgagcaacataatggactgaagactctcggtaattgtctggttcacgtgtgtagcgaatcagattttcaaaccctgatttcgtaacattgcaggtactctgttttcatctatgatgtttccagatcgtgctttctccgatatgtatctctatactacctttgttggaggaagcagaaatagagaacttgcaaaagcttcaacgtatgagatatgcaatgttttaaatgtatgctatagtcatcgtttcaaccttttggtgcctttttcttactaatttatcctcctggtttaatgatcttagggatgaattggagcaaatagtttcgtctgatctccaccagctgttgggcactgagggaaaacctacttttgtgaagtattgatatctttcacccaacttaacatgatttgtgcttataatatgttaaataaagtaactgaaatcctgaaattaagactacgaaactgtatggtgacagtcatttttactggaacaatgcattccctttatatgggcacaattacgactcagttctgagagcaatagaaaagatggaaagagatcttcctggacttttttacgcaggtaatctgtcatttgcttgttgcgataaagttcatgtacagttggcatatcaatcaacttgcattctttcttgctaactccaaacaatcaggatcattaacttgtaggctgcagcaacagagagtatctcccaagttgttaggtttcatgtaacctcgtcgctgagatgaaatttccgttggctaaaaagtgaaagttttgtattgatgttacccaaaacaaaagtattttgcatgttgcttgaagttttggttgtttcagatagtacatcctttgacatgaaaataaatggaaaagcgtatgtcaagcaattatcatctagtttctttgtttctagatactagccgcatttgatcccagatcatttttgaggaagtcagctgaaataccgtagctatccttcagttttcataataaaactttaatggatctgatgtacagtaatttagtgtgcaccgggttaataattgatattaacttcatatagtgagtcttataaagatataatgaacttatatacaatatagtggattttattaatggaaaacatatagtgaaactatatgcaatatagtatgatacataaagacttagacaacaagagcattcgaaattacaaagaacaaaggaaagaacaattgtatcaaaccggttcgaatgaacaaacaaccaccacttccacaatcaatgtaccaccaatcaagactaaactataacaatgagcttctagtttaagtctactttgagttttaatcaccaattcaacgattagatgatcaaaattgcaaaggttaagagttggtcaaacctaaccaagagttacactaggcacatagctttgttaggagtatattagtttatgaattctagttaagttagaaatccaatacctagttggattaggattcctaattggattagaattatagtttagttagaattctagtaatagtaggcgtgtgattaggagatataattagcttaattcttatattgttagtttaattcttatcctcgttttaggtttatctttagtcgaacttgtaccctatataaggggcctttatttcattaataatatagtttattttgagtttaaacctttacttgtgattgtttgcttgagaggttattaatcgaaccattaataacttttcaggattgttaagtttttagtgttaaacatcttaatttcaggagtgattttaagagtgtttagattcttgtattcaagtttcaggactgatcttgaatcaagaaatatccctagtttcgactaatatcataagtagttcgaattcttggagtcttttcttcaagattcatattcataacttgattatttagacttcttggttttgtaatcatatcaagtggtatcagttttccagggaggagaggatacaaagggttctctttgatcaaagaagatccaagggcatcaataagaatgacacttgcaataagttcgagtgatacaaacaacttcaagactcgatcttttgctaccaagaaccaatcttgacgcctgaagattgttaggacaaaggataagaagtgtttctacatccaagattgcattctttacgtccaagattgcgtcaagatccattctttaagttcaagaaaggagtagaaagcattcgaacactacttaaacatgacatccgagatggataagctggctatggccatgagtgccttggcacaatcacaaactgagtcacgcaaccacatgggtaggatggaggcacgtgaccgtggattgaaactagatgactatagtggagatggcaatccagaagacttgttggagtggatttgccaactaggcaaagtgagtgattataggggctttgatcacaagaagagattcaaggttgcttccattaggctcacgaagtatgctggaatacggctcgaaggattgcatgcacaaacttcttgcctaatgactatgaacaaaaacagttcataaggctcgcatcaataagccaaaacacacttagtgtacacgaatacagcatggagtttgacaaattagggcttatatgtgacatagaagagaaagagcaatacaagattgcaatgtacattaaagggttgaatcgatatatagccaagaagatcgaagtctcaacttatcacttctttgaggatgtgactaaattggctaagaaattcgaagagcatgacaaagaagaagggcctaagagttcttacacacctaagtatgactctagtgctaaagggaaatcaacagttccctactcaaggtggtcggaaagacctaagaaccccactacacctaaggaggacactagcatggagaagacaaaagtggccgtacctaaggagagtttaattttgtgttttatacatctttgcttaagagcttaacaattgaaactattaataacttttcaggatggttaagtttttagtgttaaacatcttaatttcaggagtgattttaagagtatttagattcttgtattcaagtttcaggagtgatcttgaatcaagaaatatccccttgttcaactattataattgatcttattcgagttcttggagttaatttcttcaagattcatattcatacttgattattagacttcttggtttagtaatcatatcaatatcattagcattaatttacccccagggagattaagaaaggattagcctaatcaaggcgcttaagaagtttttaggaaaaatcgtgcttgttaagcttaagaattgaacttctttcaccatttgcccttgattctcttgttgaactagaagatcttggttcatagtagatgctcctgcatcatagtagagcatttaattttaattttttaacatgcacgaagatgtaggtagtgtagtatatatcgtgagacgtggtttaacatatagaaagatgtagtttctgcatgatatagtgagtttttgcatgatatagtgaatgtctgaatgatacagtggatcgttccgaattgttgtagtttgtatgatatagtatttttgtgaatgatatagtgagtttcttcatgatacaatgggtttctgaatgatatagtggattgcttagaaatgatatagtgagcttttgtatcatgtagtaggtttctatgtgatataggttgttaaaagatgatacatgcttttggcctcatgtactctaatgttaacgtgaacccggtccttgcaagtcaattgcagttttttcaatattaagctatttttttttttttttttttttttttttttttttttttgtacgggaatatttagcatctttaccacaaacataaccatacgaatattatgcggaaattccagtctgaagtcttaacttttcaaaattaaaagcttctatattatttttggaatgaaaaaaaatgagctatggcatgttattttgaaatacaatgagtctcaaggtgcatagtggcttcaattctacgaataatgaatggactactgatttctaattttttgttccgggcttttgcattaggtaaccataaagatggactctctgtgggaagaactatttcctctggatacaaagctgcggagcttgtgatatcctatctcaactctacttaagatgcctaaatgatcgaggagactccgtaagtcctttctctgattctatctttgaactgagtggaaacacgactgtggtctaaagtagttgatgtctcagatatccagaaatggcgttagtgatattcaggagctgtccattgaccctttgattcattgttgcagtttactgaaagttgttagctggtctcagaaaaacgaaaggaaaaaagggggaaaacaaaaacaaagaaacgtagattgtggtgttaaaatcaagaattccagagatttgtaccttctttatcagttgaattgtttacagtgtgaatcaagaagttagctcgaccttcttttcttgtgaatggtaagatttcgtgatcatcaatacttgattgtgctgtttgcaacttcaacggtaagatttcctgatcttacagtttaattgcttgtgctgtttgccactt

SEQ ID NO: 14 - DNA, 1575 bp, synthetic construct
  misc_feature 1..1575: note = R126L mutated Beta vulgaris PPO2
  variation 378: note = n is any nucleotide
  source 1..1575: mol_type = other DNA
atggtaatgctatacgattctcacctctcaggagtctcaactcatcttcaactatcgcaggcatttcccaggaagaacccattaatggccaaagtgtctgagccgggtaaacccacttctgctaaaaggattgctgttgttggtgctggtgttagtggacttgctgccgcatataagctaaagtcccatggcttgagtgtgacattgtttgaagctgatactagagctggaggaaaactcaaaactgttgcaaaggatggtttgatttgggatgagggggcaaatactatgatagagagtgaagcggaggtcacgagtttactcgatgatcttgggcttcgtgagaagcagcagtttccaattgcacaaaacaaactntacattgcgagagacggtcgtcctgtgctgataccttcgagtcccattgcacttctcaagagcaatatcctttcagcgcaatctaagctacaacttatgttggagccattcctttggagaaaacgctatgcttctaagatttctgatgagcatgctcaggaaagtgtgggtgagttttttgagcgacattttgggaaagagtttgttgattatctaattgatccttttgtcgcgggtacaagtggaggagatcctcagtctctttctatgcgtcatgcatttccagaagtatggaatattgagaacaagtttggctcactaatttccggattaattcaatctaaactgtctccaaagaaggaaaagggtggaggaggaaagccttcttctaatgaaaagacacgcatacgtggttcgttttctttccagggtggaatgcagacacttgttgacacaatatgcaatcagtttggtaaagatgaactcaaactacagtgcaaggtcctttcattgtcctacagtcataaggggatcccttcttcagaaaattgggtcgtgtcttctgtgtcaaaaaattccattgaagatcaacaatatgatgctgtcatcgttaccgctccaatcagcaatattaaagaactgaagattctgaaagctggagttccattttcacttgacttcattccagaggtgagttacctgcccctctctgttatgattactgcgtttaagaagaccagcgttacaagacctcttgagggcttcggagttcttatcccttcgaatgagcaacataatggactgaagactctcggtactctgttttcatctatgatgtttccagatcgtgctttctccgatatgtatctctatactacctttgttggaggaagcagaaatagagaacttgcaaaagcttcaacggatgaattggagcaaatagtttcgtctgatctccaccagctgttgggcactgagggaaaacctacttttgtgaatcatttttactggaacaatgcattccctttatatgggcacaattacgactcagttctgagagcaatagaaaagatggaaagagatcttcctggacttttttacgcaggtaaccataaagatggactctctgtgggaagaactatttcctctggatacaaagctgcggagcttgtgatatcctatctcaactctacttaa

SEQ ID NO: 15 - protein, 524 aa, synthetic construct
  REGION 1..524: note = R126L mutant protein of Beta vulgaris PPO2
MVMLYDSHLSGVSTHLQLSQAFPRKNPLMAKVSEPGKPTSAKRIAVVGAGVSGLAAAYKLKSHGLSVTLFEADTRAGGKLKTVAKDGLIWDEGANTMIESEAEVTSLLDDLGLREKQQFPIAQNKLYIARDGRPVLIPSSPIALLKSNILSAQSKLQLMLEPFLWRKRYASKISDEHAQESVGEFFERHFGKEFVDYLIDPFVAGTSGGDPQSLSMRHAFPEVWNIENKFGSLISGLIQSKLSPKKEKGGGGKPSSNEKTRIRGSFSFQGGMQTLVDTICNQFGKDELKLQCKVLSLSYSHKGIPSSENWVVSSVSKNSIEDQQYDAVIVTAPISNIKELKILKAGVPFSLDFIPEVSYLPLSVMITAFKKTSVTRPLEGFGVLIPSNEQHNGLKTLGTLFSSMMFPDRAFSDMYLYTTFVGGSRNRELAKASTDELEQIVSSDLHQLLGTEGKPTFVNHFYWNNAFPLYGHNYDSVLRAIEKMERDLPGLFYAGNHKDGLSVGRTISSGYKAAELVISYLNST

SEQ ID NO: 16 - DNA, 37009 bp, synthetic construct
  misc_feature 1..37009: note = R126I mutated Beta vulgaris PPO2
  source 1..37009: mol_type = other DNA
tattccatcgaatgtagcaaattgactgtccgttgcaatttcggagtttccactcgtcgcatggtaaatggtaatgctatacgattctcacctctcaggagtctcaactcatcttcaactatcgcaggcatttcccaggaagaacccattaatggccaaagtgtctgagccgggtaaacccagtaagtcaaacattcgaatcacaactcaagcaaatttgtcttgtttgcgttatattttgctcatttcagccttttttgtttttccgacctttgcatactgaatattgtgtgtgtgtgtgtgtggggtttcagcttctgctaaaaggattgctgttgttggtgctggtgttaggtaaattttcgtctcttgcagagtttttgagtcatttgggaattctatgtgaaacttgtaactcccttcagtccaacgaacgcagtacaattttctatcaaatcatggtcctaatttccaattttccatatatattgttggaattatattgggattgtctatcactattaatagtattaggatcaattgtagagaagcacagaaatttttgggatcgaaagaatatctggattgccacattaacagcagatataattcttccaattggtttttggttcttcctaccttgacttgtctggtcaaacattataaactttaacctttaatatccattaaagtaaactataggatttttttgtctaaaacatgcttatataacatgaaatttgtgagaaaccaccttatatatatttttttgcgaaaacaaaccttaaacaaaattattatcgtgagaacaaaccttatgccaatttcgatcattgacccaaggttttggcattgaccgtgtcatgaattttgttgggtttaaaaagtcatgtgtcttgcatacgaaatggtaaatgcgggaaccttgggtcaatgtttggaatccgcataaggtttgttctcccaaaaaatgtttttgttcaaggtttgtttttgcaaaaaaacttatataaggtgctttctcagaaatttcatgttttataaagtagtatttgacaaaaaaccctaaaatatattatagaattattattgactaaattgtgtaaaaatgtactcttctaaaagtacattatagtattttagtggaacatttgcgagaaactactttataaatacgatttttgcgagaaatttcctaataaaaaaatgtgaagtgcaaaactatcttattgataattttctactccctcaaatccaaaatactatgaagtctttcctttctggtttgtcccagattagtttgtacgcttccatctttggtatgatcccacttttattatacttattagttttacgtgagttccttactctatctcttttaacaaaaatactcaactatctctatccaataaaaagttccttactagtcctatcacatctgctttttaataaaataacgtttgataaccacacaacttatatccttaaaatacacgttcaaccaagtgttgagattaatttggacggagggaataaatattttttgaggcatattggtagcagtattcggattccgataggttgactatgtttccaatgttgaccaacacttgccttgcatgtaattctaactttgctcttttttattcttcatttccctcgtattccatatacaatgtttagagacccattccttcctcttctcttctttcccttccttactatgctttgccataatcttcctcaaatgagtgcaaattaatttgtcgttgatgtaggccaactgattgtagcacatcttcatagttcatacctcaacacactcgtaattatattataccctacatgttaaatggctcatgaagctttattttatatcatacttcctccgtttcacaataagtgtaacacttttcttatttggaataatcacaataagtgaaaccaagctccaaatggtaagaaaagttcactcttattacaaatataccaccaaaaagtaagaggggatcacaacttcaatacttcttcactctactttattgtggtcccaactttctctctctaaattccttggtaactccccactttctctatgtttcacttatggtgaaatggaggaagtattttgtagtggtatttagctactaggccttggatgatatacaatcatacaatgtatttatattcacgataatttgctgcccaccttgattaccatgatttccaccaattttatcaatttcagtacttcaccaccccgaatttatattttttatttccaaccttggtatctccatttgtctgagtgcccgatccatttgtatcgcctccagaattgaagaagcttcctgcagctagacaattaggaaggttaaaaaagtttggagatggtggaggatagccataataatcattgttgggaggtggaacttggaaggttattgtagggttgaagtccttgatgaagaagaattgagttcaaatgagaggaaaaaggagcagggaagagggacaataagaaaaaaaagggtaaactaaaatcacgtgtaaggcatgtgcagatcaacatcagaaagcatagtcaacctactggtattagggcactgatacctttttgggtcaaaatttttttacaaggtatttcatgaggtagttttgtccatttttttttttacaaggtatcgtctcattttttttttatcatttagtttctcgcaataagtgtatttcatgaggtagttttttccaaaatttcctcatttattataaaatacctcatcttttccataaataatgcaatgtctagacttttacgctgtttacacatgctcctttgaccatctattgacacacaaggaaaaatagagtagagtcatgcaggatcttgttagatttttctcgatatatactttcaaaagatcaatttttttataattttttttttgaggggattttttttttataattatgtacttatcaaaggtcaaagttgtgcaccgggaagcataaaactctatgtgttgcaatttacatggaaggggaggagtataataagagaaaattatggtaaaaggttcattcctggagatcatgagaaaggaagtagaaagaacaaaaaagaacaatgggagtgcttttcaatgtttgttgtacgtagcatttattcatttgctataatgttttgtgacattgtagtggacttgctgccgcatataagctaaagtcccatggcttgagtgtgacattgtttgaagctgatactagagctggaggaaaactcaaaactgttgcaaaggatggtttgatttgggatgagggggcaaatactatggtaatgtttttgattattgcaggtcttgcactttagcgcacaattaatttctggatttttttttgtactgtggtggttatggtcatcaacatgtctcacccactgtgcttgcagatagagagtgaagcggaggtcacgagtttactcgatgatcttgggcttcgtgagaagcagcagtttgtaagtctttcattatctgaatggcacatactttatttcgaaagattgtaattgccttttctttctagatggcttcatcttcatgttgctttctgattcagtttcgtggctaactttccaagtttgtctgattgctaactctgtcatagccaattgcacaaaacaaaathtacattgcgagagacggtcgtcctgtgctggtaagtttgcttgttttacttttgacctcttttaagatctttcaactctggagcctggaaacatggtgatgcaggaggcaagttctctctattttacatcctttcttctctgtatcttatgacatttgcctcttattctgtgcagataccttcgagtcccattgcacttctcaagagcaatatcctttcagcgcaatctaaggtcgttttatgttaagacatacttgatgctgagagtttattgaattcttaaccttcttcttattttttttttatttttttagcaaaaggtaagtatattgcatttaccaaaaaacagtatgtacaccaccacagcagccatgtcagaatctagaaataccaccgaaaaaatcctacacccaaccagagacagttatattatatcctactcctaagtttctgtacccaatttacatcaatattggtccatttacaagatatttttataattcacagaagcacatcagttttaattagtttaataatgacctctggatgaataaccaactcagaccatatagccttattcctggctttccggaagttgtacgccagagcagcaagcacagcaatgcaaacctgtttcttatacctccttttatgtgtcttagcccatctcttatagctagtgaagatacagtcgtgtgcacaggattgaaccccaatccaactagcgaaagcctcacaacattatgactataaatacatctgaagtataaatgctgcacctttttctcctcttgcctgcacggtatcagaacaaatcccagctttagctaacaattccctggttttcagtttattcaatgccatcatgcaagcaatgaaagaatgttttggaacattcagtttgttccaaacacagtgagagcaagggacctttcctgcagttccacttagccacttatatccctgactaatagtatgactctttgcaccgtaaattgatttcaacttaactttttcataagcagtgaattgtgtgttgttagagtgtctagctgtctaggagattgggagaaaaggagggaccaaggagatagaaacacacctttgtgtttctttgtgtatttactttttagggtgggtcacgttttctgagaaatttgggaaaaggaagaaatagtaacacactttcccatttgtataacctgtatactggagctccaatataatttgcatttttttttgagctgcaagaatatgttgacaaacagttattgcttcttcctcagctacaacttatgttggagccattcctttggagaaaacgctatgcttctaagatttctgatgagcatgctcaggaaaggtaatgtcaagacatgtgttacctcgccttaattttcgttccaggaggtgagcatgcatttagaactaaaaggcacaaagactgttggtggtcttgcctgttcaaatataatggagaggagttttcgctacatttaccctctcttgaagtggggttgaaatatagcatcaagttgaatgcttgattaagtttaaaggacttgtgtaactctttttctgtttactgtgattacatgacctggttgattaacataatggtctgtttatctgtagtgtgggtgagttttttgagcgacattttgggaaagaggtaatggtttaccatagtatttctgctttagtggtaaattgtaatgttgctgataattatacttcgctgcagtttgttgattatctaattgatccttttgtcgcgggtacaagtggaggagatcctcagtctctttctgtaagtgaacattttgtgcttcactcccaattttttggaggctggaaatagattcttttccagttgttctgtcaaaaatagatgtagctttattttgaatttgaagttcccaattgttcattttgactattactgattattgctaagagtggcattatgctattatgctcctaaaagaaaggtgaattttgacctacatatagtataatgtatcaatattggtttaattgtttgttcttttgttccttttggtgctcatcttgcgccttgttctcatcgctcgttttttcatgttgcacttgatttaaatttgctcagcttaacttgtctttttgaatttatattacttattgctatattttactaatttcgttgaaactaattttttgctgaacttttcgttttgttgaaatcatttttctgaattaacttgattttcctgaatagaattgaattttggtgatcttaccttttctgcagccttttatttctttcttgtcctttttccaatctcatttttttatatttccattgtgttgacatcttatcattaactgtgcagatgcgtcatgcatttccagaagtatggaatattgagaacaagtatggaccataagacgtttattttaatcgacatgtatgtttcttagtttatacatatattaattctgtggtaaaaaaaccgaacaagaatatctttttttttttctatcatcaaaaagggtgaatatatgtagaggaaaaagatttgaatcaagatattagcctaaagcaataataatgttagtaatagctttaataacaaattcaaaacgtacattaatgaaccgagaggccggaaaatagttaaagtgaccactaagagaagcgaaggattcatgatgggttttcaacccagtagggcaaatttgttcaatgttctttacaaatcaagcttattaccttgtgggtgtttttgctagagatgaatgatagaattttccctagttggaagtcttttttggttactttatgggagctagtgatgtaatttgtttcgccttatggcatttcctaacatgtgcttttgtgatgtattgaagctttttttttgccttaatttatgctggattttaattttgttctttgtttcatttttcttgcttttgaaaaaaatatatagatatgtatatattaggattggtcgaggattttgagggaagggaaagacctaagaaaacttggatgagggtgattgatagtgatatgagtctatttgggatcgaagaaaatattcctttggataaggtgtagtggagggttgagggagcaaatttatgcagattagcttgacttaaagtttttctttttgattatttttcatttacttgtgttttgcaaacatttactcatgaatgatgtaaacttcttcaaccaaatctctggaaaaaaataatctacatggaaaaaacattattaatgttaacttgacagagatcccatccttgtgaagcagctagcaattaggcatctaacaattgacattttaatggacaggatagaatgtctcttgatagtcaataccctctgtttcattgtatcccatagctactaatctagtttgtatctttccaaagaaccattattttgaagtttcaccttgaacacccattttgaaccaatatgtttcttgcccttggggagaggggctaattgccatgttttgatgcggatgcaaagacacttgttctacctgagcctattgacttgatcatggatactctagggtttgaactcaagggaaagaatcaagtcttggcatgtgtggtgacatggcgtggggatggagtaaagaagagtcatagttctgttaggatatgttcttgcttgctacatagaatcgtagttctgttaggattgctatgatattatatctagtagatagattttatagttaattaggataaacatgtgatgatcatgttataataggcatgtgattagaggataggattagcttaattcttatcttgttgttagtttaattcttatcctagttttatgtttatcttagtcgaagttgtagccatataaagggcgttccattcattaataatacttagttttgctttgtgttttaaacatacttcttgattattgtttgcttgtgagctaactaatcaaaccattaaagacttttcaggagttttagtgctaaacatcttaatttcaggagtgattttaagagcgtttagtgatcttgaatcaagaaatatccttgttcttgttcgactaatatcagtggttttgttcgagttcttggagttaatctcttcaagattcttattcaacttgattgttgagcttattggtttagtaatcatatcaagtggtatcagttttccagggaggagaggatagataggattctctttgatcaacaaagatccaagggctatcaacaaggttcaaacattgctgcttgttcaagacttgatctttttctaccaagatgcattctttacgtcacaaggtagtaataacaagattaagagtggtttttacatccaagaatcaatctttcacgtccaagatttcatctttcacgtctaagattcattctttaagatcaagaaagttataacaagcatagaagaacacataaccatggagtccgagatggacaagcttgccaaagctatgcaagcacttgcaaagtcgcaaactgaatcacagagtcgactcaatgagaatactaccacaatcaatgggattggtagtaacatgaataggttggaggcacgcatggatgccattgcaaccatcatacaaaagaagcttgatcggaatagtgccaacttcataggtgccaattcagaggaagagttggcagaacgtgaagaaagatcatccaagactacatacaatgatgatcgtggcttaaagttggatgactataatggagatagcaatcgagaagacttgttacagtggattcgacaacttgagaaggtatgtgattatagaggctttgatgacaagaaaagattcaggattgcctccataagactcacgaaatatgctggaatttggcttgaaagcttcaaggcacaacgagccaagaaaggtaaagaaaagttgtgtagttggacaaagttgaaagttcaagcttaaagagaagttcttgcctagtgactatgaacaaaaatagttcataagactctctactataagccaagacacgcttagtgtacatgagtacaccatggaatttgacaagctagggcttatatttgacatagaggagaaagaacaatggaagattgcaagatacatcaaaggcttgaaccgccacattgccaagaaggtggaagtatccacttatcacacctttgaggatgtgacaaagttggctaagaagtttgaagaacatgagaaggaagagaagcctaagagttcttacacgcctaagtatgatactaatgctaaggccaaggctagcttcctactcaaagtggtatgaaggacctaagaggctaagaacctcaccccacctaaagaagacacaagagttgagaagcctaaagtcgtcgttccaaaggagaaatttgaagagatgagaaagtgcttcaagtgtcaaggaaggagacacatagcaagcaattgtcctaacaaaagagtcctcaccatgagacaatacctagctttgcaagaagaggaggatgtctattagttcgtccctgatgaagagcaaacttaggggaagaagaggaggaggatgcttttgctgaggatgatgcaaggctagtaggggtcaagaggcgcaccttacatgtcgaccatacacctagcatggagcaaatggaaaaatcttttccacactagatgcaaggtaggtgactatatatgtaatggtataatagatagtggttcttgcactaatgttattgtatctgaggtagtgtcaaagctaaacttagctacaagggcacaccctaagccatacaagttgagtttgctagatgatagcactggcatgagagtaaagaaacaagctttgatttcattctctataggggttataaggatgagttatggggtgatgtattgcctatgagtgcatgtcatctcttgcttggaagaccattgcagtttgataaaaaggtcatccatgagggggactctaatgtgtactctgtgttggttggttctaagagggtatgtttgcatcccttagctcctcattcagtggcgccaaagcaaccacctaagacaccaagttactttctatcttcaagggagttcgaacaagaggtggaggaagaaggttgtgcttatgccttgattgtaagacatgctgccacaagtgtcaagactactagcaatgagaagctcgaagccttgatgaaagagtttgaggatgtctttctagaggaactacgacccttgagaggcatagaacatgctgtagaccttgtacctggcgcccctttgcctaacaagcctgcttataagtgtgatccagtggcatctagggaattgcaacgccaaattgaggacctaattgaaaagggctatttaagggagatcatgagtccatgtgttgtgccagctttactagttcctaagaaagatgacacatggaggatgtgcatagatagtagagcagtgaacaacattacagtcaagtaaaggtttcctatgcctagattggaagatatgttggataagttacatggggcatcaatcttttctaagattgatcttcgaagtggctaccaccaaatgaggatcagagaaggtgatgagtggaaaacaacattcaagaccaagcagggattgtatgagtggatggtgatgccatttgccttatgcaatgcgccaagctctttcatgagcttgatgaatgaggtacttcgtccgttccttaacaagtttgtggttgtttacatagatgatatacatatctatagccaaaatgtggaggaacacttgttgaacttgcgtagcttattcatgaagcttagagagcaccaactctatggtaagattgatggcgacgaggttgacgggggattatggcggcagtgaatcaccctctttgccggtcactgaaatacaacctgaggtatctttaaattctgtaattggattgactaacccaaaaactatgaaattgctgggaaaaattgctggatgtgaagttgtggtgatgattgaccctggggcaacccataattttttatcactagctactgttgagaaattagctattcctgtgtcggaatcggaaggatttggggtttctctaggggatggacaggcggtgaggggtagtggaatttgtagaggggtgttattgagtttaaatggtggagttgaagtggaaacagattttcagcctctgggtcttggtaattcggacgtgattttgggtgtacagtggctggagacgttggggacagtggagagcaattggaaaacacaaacaatggggtttgaaatcgagggtgtcaagttcactttgaaggtgacccatcactggcgaggtctcgaatctcactcaaagccatgatacgtaccttatgtaaagagggtggaggtttgtggcttgagttgaaccagattgagcattatcaggagaaaacaccgcattcatcagccttacctgaaattccagttttcttacagagagtccttacccaatttcagtctgtgtttgctacaccagaaggcttaccaccgataagagaacatgaacatgcaatagttcttagagaagggtgtaatccggtaggggtaataccgtaccgttatccacagttccaaaaagatgagatagagcgcctcatcaaagaaatgttggcttccggaatcatcaatccttccacgagccctttctcgagcccggtgatattagtgaagaagaaagatgggtcgtggcggttttgtgtagactatcgggccctcaataaagaaacggtccccgataagtatcccattcccgtgattgatgaattgttggatgagcttcatggggcaacacttttttcaaaactcgacttaagggccgggtatcaccagatccgggttaaggccgaagacactctcaaaacagcttttcgcactcatgaggggcattacgagtttttagtaatgccatttgggttgacaaacgcgccggcaacgtttcaatcccttatgaacgaggtcttcaaaccattcttgcgcaagtttgtcttggtatttttcgacgatatattggtctacagtagttctgccaggaacatgaggagcatttgaccttggtgttgcacaccctagcagctcataaattgtttgtgaatcagaagaaatgtgattttggcaggtcggaagtagcatatatggggcatatcatctctggtcaaggggtggctgtggatatggagaaggttcaagcgatggtggaatggccccttcctaaaaacctccgggaattacggggatttttgggccttacagggtactaccgcaaattcgtacttcactatgctcatatagccaagcctttaactgatcaactcaagagagatgcgtttgggtggtctgaggcagcaactcaagcctttgaaaagctcaagaaggcgatgatcacatcccctgttttggcaatgccggacttccaagagttgtttgtggttgagaccgacgcatccgggtatggtctgggggcagtgttaatgcaaaacaaccgacccattgccttttacagtaagttgttaggtgcccgggctcaattaaagtcgatctacgaaatggagttgatggccatctgcatggcagttcagaattggagatattatctgctgggtcgacatttcctcattcgtacagaccaacagagtttacgtcatctcactcagcagcgagaagtaagtactgccttccaacgttggatgagtaaacttatggggttcgattttgaaatacagtttaagccggggtgtgccaaccgggtagctgatgcattatcccgcaagacagtgggagaggttgaattgggtgcgctgatattaactcatggggtggactggaccgacttggagcgtgaaattgaaggcgatcctctgttgtgcaaaattaaacaagacttccacgggggtgctattactcctgtgcacttttctttggtggacaacaagctgttgttcaagggtcgatacgtgattcccagctcttcggtttttattcctaccttgctgcgagaatatcacgattctcccattggagggcattcgggggacctcaaaacatatctcaggatggctgccgactggtattggaggggcatgcgcaaggatgtggcgcggtatgtgcaacattgtagcgtgtgtcaacaacaaaaaatgtctcaacagatgccagggggggtactacaaccactccccataccttcctcggtttgggatgacttgtcaatggacttcgtggaaggcttgccatcttccaagggggtaaacaccatcctcgtggtggtcgatcgtttgtctaagtacgcccacttcctcccactacgtcatccatttactgctgtgtcggtggcaaatgtgtttgtcaaagaggtggttcgtttgcatgggtttccttcctccattgtttcagatcgggatcgaatttttatgagtgtgttttggcgggaattatttcgtttacatgacaccacactcaaacgaagtaccgcgtatcatcctcaaacggatggtcagtccgaaatcgtcaatcgagctctggagacttatttgcgttgctttgtgggggaatacccgcgctcttgggctcagtggcttgggccgaattttcatataatacttctcctcatctctctaccaaaatgaccccgtcaaggtcctttatggtagagaccctcctactgtgatacgggttaatcggggagcctcacctgttgaaagcttggaaaacatgctccaagagcgagacgcagtattagatgccttgcagattaatctgattaaagctcaacagaaaatgaagagtagtgctgatgctacaagaagagaggtgcattttaaggtgggagatcgagtgtacttaaaattacagccttaccgtcagaaatctttggcttaacgcccttatgagaagttagccgcccgtttctacggaccatttactattttacagaagattgggcaagctgcatacaagttacaacttcctgtttctagcaaggtgcatccggtgtttcatgtctcccaactgaaacaggccgttggttccattcccgtttcagccactattccagagcaattgtcttctgacttggagttagaggtggaacctgatgaactcctcgatgttcgtagtgtttctagaggccagcacacttacttggaagctctcattcagtggcagggattaccatcattcgaagctacctgggaagatgtggctgctttccatcaccattttccatccttccaccttgaggacaaggtgaaactttgggggggtggtaatgtgatgcaccaaactaccactccactactcacctattagaggcgtaagaaaaagggggtaaatcaggaatagtttacaaattctgttgaaaggaatattttgtaattatgatgtcagaggttgttagcaaaaaggcagtagagtaacaataaaaaggggaagggaggagagaagaaggtattgagatttttgtaaggaacttggcccttgggagagttgggagcctctcgaaagctcaccattatcttgtgaatattttccttcctggttatatacaagaaccttcctctgtcaatttcttttctctctaatcttatttcttattctgttttctggttgccattgtttgaagttgcttgttgtgcttgagtaaatacgtgaagtggtgaaacccatctgaattcatcacatctattccaagtggtataatacaagcttgtaatccaaatctaatgagaaatctaagttatgaagaatttcaaaagaactaagtacccttgttttggatgcccaaggatttacttgccgctcaagttaatgctcaacgtgcaagatacaacctctttagtatcccaaggtagtttccataagaattaattgagctcaaatcaagaacaatatttttatgtattaatgtgaacacttcctgaattatattagatatatggtctgaaggttggaagaaagattagcttttaattttaagtttgagatagtttttagaatcgaggaaagattagctcttaacttgtaaactaaggattgctttataagtaaaacattagttatggaactcttaaaattggttttgaacatttctagttaaaaatcccatgtaattctcccaaactagcttaaaatctcacatttcacaagctaaggagagacaaatggcgttctcttgtgaaacaatctaaaattttcattaggctactgttttcaagtatttatatgttagaagtgccgcatataggtacataaaataagtttacaaacacaagtaggaataaggaaaactaaaagagaaacttcagccatacaaaaccggctgaaatcagctactactttctactttctagcttcaaaatctgattgcaagtctcctttaagccaatcaccaatgaaaacctttcctccacatgaagtgtgctcaaatcaagagaagaaacccatcattcgcctatagctacctgggtcagatgaagatacggcaaaaaaaacgctggaaatcagtgaaccaaaataagcaccaattggatgctttctgtccttgctacattttcttctcataggactacttcaagccatacatgaataagcagttagatccagctcctagcatccatttgatcgtacaaatgagctccaaaaagataagtaaaaccaagcagccaaaacctaattaatactaatgatgaattagttgaatagctaatgacgatgaagcaacactttagtaggaatagtgttaattatgatcaatgctacttaatcttctgattaatttttggaaaaatgtcatatctaccttctgtatacacttattcataactatatcgtattattattatttttaaataactaccttttaagtaccaaaacctaagaaatcaggcacttgatggattccatccaaagatccatttggcggggcccactaactgacttttgattttttgcctttcctcttttggttaatctcaatggttcatcaataacaactcaatcttctccccatttcatcaaatcatccctaaatcagaactttttcaaattcacccaaatgaggttatggaaacctctaccaagtttattcgaccacttttagtctagctcaaagttttacacttgcttcaaaaactaagatttattaactttagaaattaggtttttatttttattttttatttaactttgtaacaatcttaaataactcaggtgctttctagagtttggctttaattgtttttcccttggttatgtgaaagaagtatgactactttctccaagactaaagtagagagcaaaaaatgcaattctggaatttcttgcaaaagaaaaggaacgagttaatgataatgaaaaacaaagaaaatgatgagaagagaggagctgaatcaatcatgatcatgtattttaaagttttttttgctattgaagtgacttaagaagaggaaagaggatgagtgaagacaaacaaaagaaaggataaatagagggaaatcttgggcttagaaaggtgaaaaggtaagaagatgagttagtgggccccaacaaatgtatctttggatataatccgtcatgccactgtttggggcttgcttaagtccatacattacttcactaattttacaaaatttattttcttgaccaagaactgaaaaaaccttcagtggtgatctattaggttttggaagttaaaaggtagttatttaaatgtttttaatataaaaggtagttatttagatatttttaatataaaaggtagttatgtgaataaaagtgtatataaaatgtaattttttgacatttttgccttagtttttcttgctaattcaccttttcaacttgaccaagttgctatgaggagaaaacgagcaattattaagcaaatcgcaacactagcattaatccatggcccatgaaactctccataattagagattggattagcacttagtagaacttcttgctcctgctccaggtttccattacttctttatctaagtgcatcaaaaggttgttgggttatgaaaggtggtggttgtgtatagtcattgtcaaaatgttgttaatgcactctatttagaggatgagggattgaatagttttcacctcgtgacctttcattcctttttaaaaaaattgataatgtgtattggtcctatgactgtatgaatggtaataagctatctcatgagctgttactatcttcctcagagtctaggtagaagggtttgggctgataattttctactatgtgcaattagtttgttggatttggatatgctagttgatataggtcctttcccttgggccttctcttaatataggcctacagtgtgattgaagataaatcttctggagaatataagaacaatgagatggattggttagaggttgatttgttcttttggtgtaagactatttcgggttctctattggttatgttcagacgccagaatatgtgttggtgattgttttccatgaacatactttatccgcagagacatttttcttttttcttcctataagattatatttgtttcctctcttggtgctcatctcagtgtctctactttacgttaaactgttgacattacttgacaatgcgtatatttgtcgcatggtgctcttccctcactccacgtcgaccccatacatcaaaaaatgccattaaagaatattcgaactcacaaccttgtgttgaaagaatggaatccctaccaatgactcattaattcattttctctttaagaaataaatgatttcctcacaaacttttaggctttaagagcccaaaagataaaaacataaaataagatagacatcaacgtcaagattagccttaaatgcacaaagcacatgtcaaatgattgataactactcacgagttgcaactctttgggcgttgcctaatattaattggatctcttttaaaaattgttggtggttatggttggtggagaggaccatgtaacttttagctggtcacaactggtaatgattgtcacttttactgcccataaaaaaatttaaactgttgaatatgtttctggcagtggatctgacaaatcctttacaagttggcgtccattttgttttgccatgtgactcaattataatacgtgagttttattatccaccaggtttggctcactaatttccggattaattcaatctaaactgtctccaaagaaggaaaagggtggaggaggaaagccttcttctaatgaaaagacacgcatacgtggttcgttttctttccagggtggaatgcaggtattagcatgtagctttcattctgttaacatttgtggttcttccagacatacatccaatgctttttttttttcttgctataaccataaacattcttgtcatgaacattctttaatactgttgctgagcttagtgtattcgttcattcatgtaatttcctctcttgaggttaaaatggcatacagccttacaacctatatccataatgctccttagagtagaatccctaggttataacatagtaccacttatcaaaataaacatggcacacactgcaggacaagaagtaaatccacctagagaactgagcacctagtagtaaaagcagcgatacattactaataacagtagcagggccataagagtagtaaatgggcctcatttcaacactccccccgtaatggtgagagagaagaagcagtctgaactcccagcttggagagcaaaatagagtgttgctgaacagggagaaccttagtgaaaacatctggcacttgatcttgagatggaacataggtaggctgaataaccccttcttcatttgtattgtccctcaggaaatgacaatctatgtctacatgcttggttttctcatgatgaactagatatgctgctatggcaagagcagcttggttatcacagtagataggagtagcactggactttttaatgcgaagatctttgaggagttgtttgatccacatcacctcacacacagcaagagccatggatctgtactctgcactgaccacaagaaattgcctctttgactttcaagatacggggggagtcaccaaggagcacacaaaaccagatgtagaatttacaacacccatcccattcactatcacaaaatgctgttagttgagcactagacttgttcgccatgagaattcaccctgttggcagcttgaagatgcacattagtggggcagtgcataaatttgcttaaatcatgtatagtgaaggcaatatcaggcattgccttgtaatagtgagataaatgagcttccccatcaatttttgatacacatcaggttgttgaagaggatcaccattgtcagcatagagcttgacatgtgagtccatacgaagcctcaatcgtctgcaatttataaaaccatattcatcaacaagacccatcacatacttctttagagataaaaacgatacttcactacactgatccacttcaatcctcaaaaaatatcttaggccacccatatctttcatgtgaaattggccagcgaagaaactctttgcttcctcaatagttgctaaactattgccagcaagaatgaggtcgtccacatacaccaatatagcactgaaacagtgagagttttgcttgaagaatagagagtagtcacacttggattaagtgaatacattttgctttaaagcagtgttagcttggcaaaccattgcctcaaagcctacttcaagccataaagtgacttaagcagcttgcacaccttagttcatttggtgtcacttctgccatcagtacttagctccccctctccttgaactttgatcctgttacatgtttcactatatcctggtgatagcttcatgtatacactatcctacaattcaccatgcaaaaaagcatttttaacatccatttgtttgcaagaaccaaccctctaaggatgcaacaacaagcatgtggtcatctttgctacaggggtaaaagtctgctcataatctattccatatctctgtctgtcacccatgattacaagccttggcttatgcctattatttgtgccatcagtgctgtattttgttctgatccatccatgtgagggatggctcatttctacaaaatcctagttccgttaggatttgtgttgttttcctaattctagtaggaataggactcctaaaatcctaatcctcctagttctgttaggagtttaaaagttttagtttgattgtaattctagttgtgttagaaatccaaatcctagattcatgtcacgtatggttagaacatggctagtaggataatttgtcttgtgatgtccatagccttggcatttgtggcacctaactttcaatagcttgtcttctgtctccttttctttctccttctttgaggaatcaacgtttttagagctatctaaaccactagcatcaatattaggtttaaaagtgctaaaagatttcgaatagttcttacttgcatacaatttctttttctagtttatgtagcgtcaccagggaacaaaaactcggccgttccgttctggaacggccgctttgtaacggatttcagagaggccgttccgttaaataccgttctagaacggtgatttggaattcacaccaaactcggcgcgatagcgttacgtaacggtgtaacggcgttccagaaccgttacaatcacataacgtccgttatttgaagaagaccagttcttttggtggaggaagaagaagagccaacgcaagatctatagatctgagttaaaatttgaaaataaaacatgtttttttatttaaattaaagcttacagaggatgtagaactcaaattcgagtaaacccctcctttaatttcattaggttactgcaaatcgaaccctaaattgcaaaccctaatttcgaaaaaaccctaatatgcattgggatgcaacgctgcttctccggtcatggcagagaaggtcgacgagtcatcttcggctgcttttagcactgtagctgccggtggttggcttgtttgcaggttagtgcttgctggttttctttctctcataccgatcatcttcttcttttctctcttctctttttcttttttattgtgtgactgccagtcacgtgataattgcaactcataaagtatctctttctctctcttcttttcatccctttttatttttctttcccttttagtttttattccctcacgtggaatcacctaattttcatccttttttatttttttagttacactcttacacagaagtatgttcaaatatcattatagtacctcaaatattgtatttataagagttttggacataatatgatatagaaagtaaaatagaagaaaaataaagtttaaatgtcacttgtgtgatttttttaaaaaaattcacgccgcgacggccgcgaaacgttctatttcccgttacaagccgttcccgcgataacgcgaccgttcccgcgaacgcgaccgcgaccgcgttttttttccttgagcgtcacatcttgcaagcttcttcaaaggtgagttatgtgtacaactccaatttctctccaatcccctccgtcctcatttaggcctccaaggaagctacttaaacattgatcttcaagttcatcaattttccaaagaatggataacttctcgaactcctttatgtaatcttcaacggacatattcccttgtttaagagtagaccattccatgtacaagctttgtttgtagttagaaggaacaaaacgtcctcttaacaactttttaagcttatcccaagtagagattttgggtttattagctttcacacgctgcctctttactccatccaaccaaatagatgcatatttggttaccttaagcacggccaccttgtatttcttttcttttggtgtctcttaatcccaagtagagcttttgcgtgtgaaagctaataaacacaaaatctctacttgggataatcttcttcttgtttccgaaacaactaattcttatggtagttaggaaagcaagaatggtttctaattcaatagggaatatattaattattattagtttaagttaaatagtgcacgaatctaaatagattattcgtctcaaaatctcacttaagtatagatttgtttggacatctgagggaagaagaagagagcgagataaaggagaattatcactcaatgaatccatatcccgagttttcccatttacttctttgaaagcaatatagttcacgaggtcttattatcagtctatggacataagagtaataatttaagggcaaaaactatgactttatgggtttaaactgatacatgttctgttaaactgatagatgttctgtgttaaaccgatactcatatattcctggttaaactgatagatatatgatttaaattgatacccgtctcagtcatgtcttggattgagacggtctgacacaagactttttgtgtattatatatctgattagaataaatttatcctgtttactaattattttatcttctccagacacttgttgacacaatatgcaatcagtttggtaaagatgaactcaaactacagtgcaaggtcctttcattgtcctacagtcataaggggatcccttcttcagaaaattgggtcgtgtcttctgtgtcaaaaaattccattgaagatcaacaatatgatgctgtcatcgttaccgtgagttttactttgcttactgctattgcaccaatctttcttcttttgacacactgataatggcaatgctgttgtggtttgaagccatgttatggggttttagggatatttatggagtctgatctaatatgttattggataaaattcagatctgtaacgtgactcaatgagattgaaaaaaattgaatcaagataatggattggaaaattaggagctaacctagggtctataagcgatccacttggagtctcataccaagcaggtattcgacattttaggtttatattgctgctatggctcatatgggagcctacatagggtctggtgcttattcctttttcttttgtctagttttggggctgcacatttctgttgtgttttgatatggatagccatcacctgcaattgcatggaggctgaactaagttctataggggagcaaacagtatctgttggaaatttattttcatattgtgtttttaaatgctataatccaaaatttgttgttcccctaaaatgcctaaaatacccttatgtaactgctccatctgtcccttaatagacttcccatttctccaatgcatgtttgccaatacacattttgtattgttaatatcaaaaattacatattagtaaaaattataaaagtttgattttcctaatgtacgcaatgagacgaatcaaacaagacgccatatgactatgttttttcttatacttcctatgttttttaataagtgacatgttttccttttagggaaatgtcacaataagtgacacatagctcaaagtagtaaaaatacttctcatttattacatctttgccattatttaattgtttcacctacctactttatccaatactcaaatttgattggttgaacaattggtcccaactttctctagactccttggtattccctttcccccactttctctctgtgtcacttattaaaaaatggaggacgtatattggaaaaaaattggaaggttttcttcacttatgaatagtggtaaaattagagatgggaaggctattttgggatggatggagtaatatttaaatttttaaaataatgtcattgttttagtgatgaaataaaattcaaggctattttttctagtaattatgttatctgtacatcaccacacgtatcgcgtgcatataagactagtttgatgatattccaacactgttcgaaggaagtcaggcatggaaccatgtttgcttccatatgggaaatattttgcttactctccttcaaacatctacctcattatcccagaatgattgatcgaatctaatacaaatatacaattgatcatatgccaccagggaattacatcaaattaaatttttatagaaggggaatcagtcatagcctcatagggaacgaataagtgatactcgccagtttctttcctggttacttttcctcttctcactagccatcctttatgtatgggtatgctgcatcattcctgccactggttgggactcccgtttgaactatggggggatgggaaagctaagccatcatcttcaaattgagtttcttgagaatgtaagacaccatctgtaagatgaatatagtgcactctatagtcaatgtcatgatctttatgggtttatctgctgaaataactgtgatatacccagctctccatttacaaagttttcctacatattaaactcttgcccgcaattctagaacttcattgtagaacttttcctacataagcatcatttgtcttttctgtagtaaaagttagaaagagctttattttagaacattcgtttttagttttctttgttgttgattactccgccacttttaatacttttatgattcaagtatttgacaaaatcatgtaatttaggtcctctgctgcatgcagtctataccctctctctctctctctctctctctctctctgtggttgtgtcttacttgttgagttactaactccagccattacataaagtaggctggcattatgatgagcaaattactcaagaccacatgttagctcctttttcttttctccttattctgaaaggcaaatataggtccatcttggtgcttctcatgtcataagtaagctgaccccctccttttccagggaataggacaataatccaaaagtgagggttttacatgttgggatttgtgaagtttcttattttacttaatagccgagtcagtgttacaatacatagtaccgtgttacaaaatagtatgtaacaccaagcatgtttatgtgcaaaattgtgcaagactttgttgctggcacgccaagggctgttttaatgtagtttacttattcttttaggtttttcagatgacaatcataaagggaattaggagtgtttttattgtagtcaatccctattgtgctacaacgataaaagaaaaaagcacaagactagaaggagaagtaatgtctaggaaagactcctcacctggggttgctagtcacctacacatcttagaaggcatcaaaccaaagcttattcccctcgactgttttcgggagaaaagaagacaaaattgtttctaacttatactttaccagtttcactacagcatcagaaagaagcaaaatatgctcccacaacacggcgaacctagctttccagatgtgataaaccagaccagcaaaatgattattttcactagagctttgagtctattttttcggtttttccccttcttcctggtaatgtcacgccaccaagccatcatctcaattttttgagatttgacgtaatcgctcaaatagctgagtaagacacttcttgctctaaatactaataaaaaagaggtgaatgtgggtctcagccatgttactcaaatcggataaagtgtctactcttattagggtttttgggtgttggactcatccatttttttttgtaaaatgtcaagattttggtttgaaatgagagattcaagtgtcgtgacatgagtcggcacgcaacacttaaacgtgtcgaagtaacagagggtctcagacaatcaactttaatcaatcacgaaccccaaaatttatgcaacctttgctcatattcagtctctgtaaagcactcaactgcagcacacccacccattcgcttcacctacagcaggagggcacccaagtaattgctatgatgagcgaattattctgttttgccttgctggaatattgctgttagatttgctgactcactggcagttaattatagtcagagaatgagaaatatcctgtagagagagaaagggtatcttttgtatttagctctataaatagctaaggaagggaagggcattgagagtttatgatattataataggagagatttagcctctcgaatgctgataggagcgtagctcttgttggattatcaatactactctgtttgctctatctatttctactcaggttccttcttgtacagtggatccctgattggatttacttcatcaaccagcagataaaattatttgtaggcacattgaaaccattccaaacctaatgaggccaaagtttatcacaaagaatataggagccaaatgtaggcaacagataagagtataattgccagaagttgaagactccaggtattgttcagaaaccttaatgcatatcatcattctgacactagattttccccggagccaactaacaaaaatgaattaaagagattaaggctatgtttagttcacctgaaattttctgatctgaacttatctgatctgatctgaacttattttttctgatctgatctgatctgatctgaaccaatctgattacaagatcttatcttttagatttttctcaatatataagaaaaaatatagtcatgtggggtcttgtttgattcgtctcaatgagtactttattaatattcaattattataatttttactaatatgtaatgaaagatataatgatttttaaatataagcatgatctgaactgatctgatgtgaacttattttttctgatctgatctgatctgattagatctgaaataagcaaaaataaggtgaactgaacatagcctaagcaacaattgagggaaaataagatcattatggctaagataagataaatatgtaatgataaaatcagagtaattatatcagttacactctcaacattcgtcagattgaggtttcctcccaaaatgccaacccacttttctgtattttcacgtccttctctctacccttctaggtatatattacatcagctgtaaaatttttgaaccaactagtagaatactgatctaccctcaactgcctcactttctcattttttctgggcctttttctctctagcacaagtccacataagtgatgcatagcagaaatataattccactagtcatcctcaatattgatataacaaacacatcacccacatattatcatttttaatcgctgcatgcgaggcatacttacccaccaatcaggatatgcataacagcgttcctaattccaaaaccaccatatatcttgggtttgcaactctcatccctagcaacaaggggactttctgaaaaagtggcagattccgcccacaagtagtttgtacggacacctttattatattattaatatcatatttcggcaacacaaattaccagcccagtaaaacatgaattgacatgagactaacaaggggcccaatctaatatcgtacgtctgtactaagcaatgtataaaaaaaagctcaaggtgcattgatgcaatagggatcctaatgtgcataggtgcgcctcattgaagtgaggcaccactaaggataaataaaaaagattgatgtaaaattaaattgtgcaccttgggtgcgcctcgatgaactttttttgtgtgcctaagtgtacctcaagtacgcctcattgatatcgcctcgcctggcagaaaacgagcttgaccccaatcgccttgctccccaccgcctaggcgtgcctcagtcacactttttaaatacattggtattaagtactcagaatggcaaaaagaaactttgggcattaattagacatttcactttttgtgcaactatttgtgacttcagagattgatatgttttctacattacagacttttgtgatggctgcatggtctccactgtcaaagaacattagtttaagtagaagaaatattgctctattaccttcctccctctacaaacaaaatcctaaaatgtggttatgtagtgccaattcaaacttgtagatgcatgactaatgctttcattatgctgtgggtttttatactatgattcatgtccaattacataacaattagctggagtcaggatatgtcacggaaattttaagcctggcaggatgattgtttatattttctctttttcggtgtttaagtcaaagtaaacttctaggctgctcttttataggctagttgggctgttggggagatctacacattaagtgtgaagaaatcttgtctaactccagtttggttgagaactgtaagctgtcataacatttgttgcatgatgaggccttgtgggattatcatgttagctgtaaactctaaacttacttgaaatctagtgttgtgtctccttatttctgtagtcaaaattgaaccttctgtacgtttttgatacctgcgactagaatgatggaattctgaattactgatactattacaaccatctgctaagaacgaagatgactcttagctaatttctcagcagatttagagaaattaagaagaattactaatgaatatttaaagagaaaactaccaagatatgattgtattgatgaaaaacaccaattacaacctaaccaacattcgagaggttggagctctcccaagtaaccatttctctcactaaacttatcaattttcaagatgccttttccattctcagttcctctatatttatactactccccttagcaaactacccaacttattccccaagtaaactaaagagataatatctaaaatacccttccccctacaataatattagttcttagcattaccggccccctaaacttccaccttgtcctcaaggtgggtcgtaatcatcactaaattctgggcctctactcgtatattcagtgtcttgcagcccttcaggccccaagcctaggttatgcagctcgtgttgcggctcctcctcatatagttctctggctggagtgagtgcctcaactataatgaaaaagtcctggaggtggggaaggaaggagtgtctgaaatggtgtggtgtgctgctggtgttatgggcttgtgcctgaaagttttgggtttaaagagatggagtggagaagagtggagaagtgactggagacgtaaaagaaggaatcataatttttgtaagtggtgggttgaaaaagttggtgggaagaattgtttttataaaatgtagtgtaatggtcgaaaaatgggtggagtaagtatggtttttggctggggatgtggtactgggttgaaaataaataggtctgagcttacttgtaaaattggcctcaacatgagcaggcccaatatcttgagccaattccccaaaagctggcaatagagcactcttaattgcattgttgtgggccatcgggctccaaacatatattcggaggagccggacttctttggtgatgtcattagcttggcccattgcacactttcccttaacagcctcaagatcttttcccacttttgtaccccaaccacgtggcttcaccatcctttctttcttgcttttgtcacttttttggcaatatacgagtttgtccttactaccctcatcttctaatgttggcttcctcaccaagcttaatttctggaattttgtccaccaaatcccaccacccatcgtcaacaccatacctatctacaccggccaagaagcctggtcctccacccgaattttcgccacagacaaagcctgaacaaccgtcagttctctcaccggagaagttcacaggtccaccacctgacccactagttgctgatccacccttcacaaatctccctcctctggctgccacaagtagtggttcctccgtaatactcatatttctcgtccaagagccctggaccaccaccggacccacttccaccggcaccaacttgttcaaatgatacttctctttcttttccaaacagcctacttggactggaaaaaccactgcgattgtagcctccgccagatctgtagcctagtgcacctaacgtgcttccaactgcaacccaatagggatggaaatggatgggattcggggagggtggagcatcacccgcatccgtcacccgcatccattcgctccacccgctccacccgcatccatccatccgtcacccacgggtgaaacgggtgggtcggtgataaacgggtggaaccatttagggggtgtttggtatcatgtttttttacaaaagaaacagaatcaagtaacaaaatccgtttctacttgtttggttctatgttgctcagactcgagtacccatgtccgacacgggtacgtgtccaagtgtccaactcagctattttctagaattttttatattttttaacccaaaacaaagtgtccaagtgtcccacccatgtccgactcccgaggatccgacacgggtacttgaggtgaaatgaagagtccgagcaacggaggtttggttagtgtgtaaagtaacaattaccgttacttgaggaaaacacatccccccaagttgtttccattcaaaaacctaaggaaacaaataacgtttcactcctcaaacaagaggaaagggaatgggttatatttatttccattccattaggataccaaacaactaataagggtaacacttattattatcctttcccctccttatcaaaatcctttccattccgtttacggtattcataccaaacacccccttagtatattttctaatgaaatttgtgatatgatatgcatgatataaaataattctatcaaaaatataaaaagtaagtaaacttacatgtacaacttaatagatgggtgatgggttggaggttaaacgagtgatggatcgggtgacgggtgaagaaattctcacccaccactcgctttccatccatttaaattaggtttttcatccatttaaaaaaccgggttaaacaggtgatgtatgatccatcacccatttccatcctcaaacacatcccgatttgtttactgcaccaccagatccaccagtataaccacccgaaaaatcatcatgccttctactagccttgtaacctgctcccggtgagaagcttcttccacaagtggtggtcgctggacctccatctccttcttccccaaaaaattttccatgacacccactcgacccttcatctgtgacaacctcttcttcgtccacctctgaagttttggggtcgtcttcctcctcaagctcctcttgaagtaactttaacttccgttggatgggagagaacgcttcattgattatcttcaccagatcttcttgaagtttctcgaaactttttctcacgttttcctctacctctttcgtgatttcctttccgatctccttcatttttagactaggagctcttgcgattccatggcagatttctttttttaaaacaagaaaatcaggcacttaatctcccagaatagtggtgctctgataccattttctaagaaccaagatgactcttagctaatttctcagcataacaacaaatttagagaaattaagaagaattactaatgaatatttaaagagaaaactactaagatatgattgtattgatgaaaaacaccgattacaacctaaccaagaggttggagctctcccaagtaaccatttctctcactaaacttatcaattttcaagatgccgtttactactccccttagcaaactacccaacttattccccaataaactaaagagataatatctaaaatacccttccccctacaatattagttcttagcaccatcaaactgggatggatggttttgtaaggttccaatttacttctccatcaaaatattttaggattttttatctcatgtattttagagtttcctcgtccctttttatctgataagattcttctgatgatttgattttatggtaggctccaatcagcaatattaaagaactgaagattctgaaagctggagttccattttcacttgacttcattccagaggtttgtatttttatagtggttagacatgcttcccctagttttcaaagtaaaagcatccttgttgtgacgatattttttcccttgtttttgtttttattattatcatcacttatttccattttctattttccatgctgataagatgttcatcaccataatcttgtggtatcagaagtgtttagtggagtttattcactacacatgcagttgttcttttgccatgaccgccattcattttctcgtcaaaacaaatctatgaagtttggttttcagactcatggttcttgtagctcttgtgaatttttttttcttctccttgcatgcattcttcaaattacatattgcatataccaggtgctctcctttattttatatttaatttttaaaattctatcatatattttttaatgtcaaacctcaaactaggggttcactgcatcttaggcttaccaggctaatatttctttacttaaccttttccctttatatttgctatcctcttgtgtagtaatcaccataagaagggtacaaactaaattaccctcccattcttttgtatcattctgaaatagtgtcacagagctttgatttttttgccctcatttaatctggcaaatgttctctctatttttttttttttactttcttttgacgggattctcaggcaattgttacggggagcagccagtcacactgtttctgtttattatgcaggtgagttacctgcccctctctgttatgattactgcgtttaagaagaccagcgttacaagacctcttgagggcttcggagttcttatcccttcgaatgagcaacataatggactgaagactctcggtaattgtctggttcacgtgtgtagcgaatcagattttcaaaccctgatttcgtaacattgcaggtactctgttttcatctatgatgtttccagatcgtgctttctccgatatgtatctctatactacctttgttggaggaagcagaaatagagaacttgcaaaagcttcaacgtatgagatatgcaatgttttaaatgtatgctatagtcatcgtttcaaccttttggtgcctttttcttactaatttatcctcctggtttaatgatcttagggatgaattggagcaaatagtttcgtctgatctccaccagctgttgggcactgagggaaaacctacttttgtgaagtattgatatctttcacccaacttaacatgatttgtgcttataatatgttaaataaagtaactgaaatcctgaaattaagactacgaaactgtatggtgacagtcatttttactggaacaatgcattccctttatatgggcacaattacgactcagttctgagagcaatagaaaagatggaaagagatcttcctggacttttttacgcaggtaatctgtcatttgcttgttgcgataaagttcatgtacagttggcatatcaatcaacttgcattctttcttgctaactccaaacaatcaggatcattaacttgtaggctgcagcaacagagagtatctcccaagttgttaggtttcatgtaacctcgtcgctgagatgaaatttccgttggctaaaaagtgaaagttttgtattgatgttacccaaaacaaaagtattttgcatgttgcttgaagttttggttgtttcagatagtacatcctttgacatgaaaataaatggaaaagcgtatgtcaagcaattatcatctagtttctttgtttctagatactagccgcatttgatcccagatcatttttgaggaagtcagctgaaataccgtagctatccttcagttttcataataaaactttaatggatctgatgtacagtaatttagtgtgcaccgggttaataattgatattaacttcatatagtgagtcttataaagatataatgaacttatatacaatatagtggattttattaatggaaaacatatagtgaaactatatgcaatatagtatgatacataaagacttagacaacaagagcattcgaaattacaaagaacaaaggaaagaacaattgtatcaaaccggttcgaatgaacaaacaaccaccacttccacaatcaatgtaccaccaatcaagactaaactataacaatgagcttctagtttaagtctactttgagttttaatcaccaattcaacgattagatgatcaaaattgcaaaggttaagagttggtcaaacctaaccaagagttacactaggcacatagctttgttaggagtatattagtttatgaattctagttaagttagaaatccaatacctagttggattaggattcctaattggattagaattatagtttagttagaattctagtaatagtaggcgtgtgattaggagatataattagcttaattcttatattgttagtttaattcttatcctcgttttaggtttatctttagtcgaacttgtaccctatataaggggcctttatttcattaataatatagtttattttgagtttaaacctttacttgtgattgtttgcttgagaggttattaatcgaaccattaataacttttcaggattgttaagtttttagtgttaaacatcttaatttcaggagtgattttaagagtgtttagattcttgtattcaagtttcaggactgatcttgaatcaagaaatatccctagtttcgactaatatcataagtagttcgaattcttggagtcttttcttcaagattcatattcataacttgattatttagacttcttggttttgtaatcatatcaagtggtatcagttttccagggaggagaggatacaaagggttctctttgatcaaagaagatccaagggcatcaataagaatgacacttgcaataagttcgagtgatacaaacaacttcaagactcgatcttttgctaccaagaaccaatcttgacgcctgaagattgttaggacaaaggataagaagtgtttctacatccaagattgcattctttacgtccaagattgcgtcaagatccattctttaagttcaagaaaggagtagaaagcattcgaacactacttaaacatgacatccgagatggataagctggctatggccatgagtgccttggcacaatcacaaactgagtcacgcaaccacatgggtaggatggaggcacgtgaccgtggattgaaactagatgactatagtggagatggcaatccagaagacttgttggagtggatttgccaactaggcaaagtgagtgattataggggctttgatcacaagaagagattcaaggttgcttccattaggctcacgaagtatgctggaatacggctcgaaggattgcatgcacaaacttcttgcctaatgactatgaacaaaaacagttcataaggctcgcatcaataagccaaaacacacttagtgtacacgaatacagcatggagtttgacaaattagggcttatatgtgacatagaagagaaagagcaatacaagattgcaatgtacattaaagggttgaatcgatatatagccaagaagatcgaagtctcaacttatcacttctttgaggatgtgactaaattggctaagaaattcgaagagcatgacaaagaagaagggcctaagagttcttacacacctaagtatgactctagtgctaaagggaaatcaacagttccctactcaaggtggtcggaaagacctaagaaccccactacacctaaggaggacactagcatggagaagacaaaagtggccgtacctaaggagagtttaattttgtgttttatacatctttgcttaagagcttaacaattgaaactattaataacttttcaggatggttaagtttttagtgttaaacatcttaatttcaggagtgattttaagagtatttagattcttgtattcaagtttcaggagtgatcttgaatcaagaaatatccccttgttcaactattataattgatcttattcgagttcttggagttaatttcttcaagattcatattcatacttgattattagacttcttggtttagtaatcatatcaatatcattagcattaatttacccccagggagattaagaaaggattagcctaatcaaggcgcttaagaagtttttaggaaaaatcgtgcttgttaagcttaagaattgaacttctttcaccatttgcccttgattctcttgttgaactagaagatcttggttcatagtagatgctcctgcatcatagtagagcatttaattttaattttttaacatgcacgaagatgtaggtagtgtagtatatatcgtgagacgtggtttaacatatagaaagatgtagtttctgcatgatatagtgagtttttgcatgatatagtgaatgtctgaatgatacagtggatcgttccgaattgttgtagtttgtatgatatagtatttttgtgaatgatatagtgagtttcttcatgatacaatgggtttctgaatgatatagtggattgcttagaaatgatatagtgagcttttgtatcatgtagtaggtttctatgtgatataggttgttaaaagatgatacatgcttttggcctcatgtactctaatgttaacgtgaacccggtccttgcaagtcaattgcagttttttcaatattaagctatttttttttttttttttttttttttttttttttttttgtacgggaatatttagcatctttaccacaaacataaccatacgaatattatgcggaaattccagtctgaagtcttaacttttcaaaattaaaagcttctatattatttttggaatgaaaaaaaatgagctatggcatgttattttgaaatacaatgagtctcaaggtgcatagtggcttcaattctacgaataatgaatggactactgatttctaattttttgttccgggcttttgcattaggtaaccataaagatggactctctgtgggaagaactatttcctctggatacaaagctgcggagcttgtgatatcctatctcaactctacttaagatgcctaaatgatcgaggagactccgtaagtcctttctctgattctatctttgaactgagtggaaacacgactgtggtctaaagtagttgatgtctcagatatccagaaatggcgttagtgatattcaggagctgtccattgaccctttgattcattgttgcagtttactgaaagttgttagctggtctcagaaaaacgaaaggaaaaaagggggaaaacaaaaacaaagaaacgtagattgtggtgttaaaatcaagaattccagagatttgtaccttctttatcagttgaattgtttacagtgtgaatcaagaagttagctcgaccttcttttcttgtgaatggtaagatttcgtgatcatcaatacttgattgtgctgtttgcaacttcaacggtaagatttcctgatcttacagtttaattgcttgtgctgtttgccactt

SEQ ID NO: 17 - DNA, 1575 bp, synthetic construct
  misc_feature 1..1575: note = R126I mutated Beta vulgaris PPO2
  source 1..1575: mol_type = other DNA
atggtaatgctatacgattctcacctctcaggagtctcaactcatcttcaactatcgcaggcatttcccaggaagaacccattaatggccaaagtgtctgagccgggtaaacccacttctgctaaaaggattgctgttgttggtgctggtgttagtggacttgctgccgcatataagctaaagtcccatggcttgagtgtgacattgtttgaagctgatactagagctggaggaaaactcaaaactgttgcaaaggatggtttgatttgggatgagggggcaaatactatgatagagagtgaagcggaggtcacgagtttactcgatgatcttgggcttcgtgagaagcagcagtttccaattgcacaaaacaaaathtacattgcgagagacggtcgtcctgtgctgataccttcgagtcccattgcacttctcaagagcaatatcctttcagcgcaatctaagctacaacttatgttggagccattcctttggagaaaacgctatgcttctaagatttctgatgagcatgctcaggaaagtgtgggtgagttttttgagcgacattttgggaaagagtttgttgattatctaattgatccttttgtcgcgggtacaagtggaggagatcctcagtctctttctatgcgtcatgcatttccagaagtatggaatattgagaacaagtttggctcactaatttccggattaattcaatctaaactgtctccaaagaaggaaaagggtggaggaggaaagccttcttctaatgaaaagacacgcatacgtggttcgttttctttccagggtggaatgcagacacttgttgacacaatatgcaatcagtttggtaaagatgaactcaaactacagtgcaaggtcctttcattgtcctacagtcataaggggatcccttcttcagaaaattgggtcgtgtcttctgtgtcaaaaaattccattgaagatcaacaatatgatgctgtcatcgttaccgctccaatcagcaatattaaagaactgaagattctgaaagctggagttccattttcacttgacttcattccagaggtgagttacctgcccctctctgttatgattactgcgtttaagaagaccagcgttacaagacctcttgagggcttcggagttcttatcccttcgaatgagcaacataatggactgaagactctcggtactctgttttcatctatgatgtttccagatcgtgctttctccgatatgtatctctatactacctttgttggaggaagcagaaatagagaacttgcaaaagcttcaacggatgaattggagcaaatagtttcgtctgatctccaccagctgttgggcactgagggaaaacctacttttgtgaatcatttttactggaacaatgcattccctttatatgggcacaattacgactcagttctgagagcaatagaaaagatggaaagagatcttcctggacttttttacgcaggtaaccataaagatggactctctgtgggaagaactatttcctctggatacaaagctgcggagcttgtgatatcctatctcaactctacttaa

SEQ ID NO: 18 - protein, 524 aa, synthetic construct
  REGION 1..524: note = R126I mutant protein of Beta vulgaris PPO2
MVMLYDSHLSGVSTHLQLSQAFPRKNPLMAKVSEPGKPTSAKRIAVVGAGVSGLAAAYKLKSHGLSVTLFEADTRAGGKLKTVAKDGLIWDEGANTMIESEAEVTSLLDDLGLREKQQFPIAQNKIYIARDGRPVLIPSSPIALLKSNILSAQSKLQLMLEPFLWRKRYASKISDEHAQESVGEFFERHFGKEFVDYLIDPFVAGTSGGDPQSLSMRHAFPEVWNIENKFGSLISGLIQSKLSPKKEKGGGGKPSSNEKTRIRGSFSFQGGMQTLVDTICNQFGKDELKLQCKVLSLSYSHKGIPSSENWVVSSVSKNSIEDQQYDAVIVTAPISNIKELKILKAGVPFSLDFIPEVSYLPLSVMITAFKKTSVTRPLEGFGVLIPSNEQHNGLKTLGTLFSSMMFPDRAFSDMYLYTTFVGGSRNRELAKASTDELEQIVSSDLHQLLGTEGKPTFVNHFYWNNAFPLYGHNYDSVLRAIEKMERDLPGLFYAGNHKDGLSVGRTISSGYKAAELVISYLNST

SEQ ID NO: 19 - DNA, 37009 bp, synthetic construct
  misc_feature 1..37009: note = R126M mutated Beta vulgaris PPO2
  source 1..37009: mol_type = other DNA
tattccatcgaatgtagcaaattgactgtccgttgcaatttcggagtttccactcgtcgcatggtaaatggtaatgctatacgattctcacctctcaggagtctcaactcatcttcaactatcgcaggcatttcccaggaagaacccattaatggccaaagtgtctgagccgggtaaacccagtaagtcaaacattcgaatcacaactcaagcaaatttgtcttgtttgcgttatattttgctcatttcagccttttttgtttttccgacctttgcatactgaatattgtgtgtgtgtgtgtgtggggtttcagcttctgctaaaaggattgctgttgttggtgctggtgttaggtaaattttcgtctcttgcagagtttttgagtcatttgggaattctatgtgaaacttgtaactcccttcagtccaacgaacgcagtacaattttctatcaaatcatggtcctaatttccaattttccatatatattgttggaattatattgggattgtctatcactattaatagtattaggatcaattgtagagaagcacagaaatttttgggatcgaaagaatatctggattgccacattaacagcagatataattcttccaattggtttttggttcttcctaccttgacttgtctggtcaaacattataaactttaacctttaatatccattaaagtaaactataggatttttttgtctaaaacatgcttatataacatgaaatttgtgagaaaccaccttatatatatttttttgcgaaaacaaaccttaaacaaaattattatcgtgagaacaaaccttatgccaatttcgatcattgacccaaggttttggcattgaccgtgtcatgaattttgttgggtttaaaaagtcatgtgtcttgcatacgaaatggtaaatgcgggaaccttgggtcaatgtttggaatccgcataaggtttgttctcccaaaaaatgtttttgttcaaggtttgtttttgcaaaaaaacttatataaggtgctttctcagaaatttcatgttttataaagtagtatttgacaaaaaaccctaaaatatattatagaattattattgactaaattgtgtaaaaatgtactcttctaaaagtacattatagtattttagtggaacatttgcgagaaactactttataaatacgatttttgcgagaaatttcctaataaaaaaatgtgaagtgcaaaactatcttattgataattttctactccctcaaatccaaaatactatgaagtctttcctttctggtttgtcccagattagtttgtacgcttccatctttggtatgatcccacttttattatacttattagttttacgtgagttccttactctatctcttttaacaaaaatactcaactatctctatccaataaaaagttccttactagtcctatcacatctgctttttaataaaataacgtttgataaccacacaacttatatccttaaaatacacgttcaaccaagtgttgagattaatttggacggagggaataaatattttttgaggcatattggtagcagtattcggattccgataggttgactatgtttccaatgttgaccaacacttgccttgcatgtaattctaactttgctcttttttattcttcatttccctcgtattccatatacaatgtttagagacccattccttcctcttctcttctttcccttccttactatgctttgccataatcttcctcaaatgagtgcaaattaatttgtcgttgatgtaggccaactgattgtagcacatcttcatagttcatacctcaacacactcgtaattatattataccctacatgttaaatggctcatgaagctttattttatatcatacttcctccgtttcacaataagtgtaacacttttcttatttggaataatcacaataagtgaaaccaagctccaaatggtaagaaaagttcactcttattacaaatataccaccaaaaagtaagaggggatcacaacttcaatacttcttcactctactttattgtggtcccaactttctctctctaaattccttggtaactccccactttctctatgtttcacttatggtgaaatggaggaagtattttgtagtggtatttagctactaggccttggatgatatacaatcatacaatgtatttatattcacgataatttgctgcccaccttgattaccatgatttccaccaattttatcaatttcagtacttcaccaccccgaatttatattttttatttccaaccttggtatctccatttgtctgagtgcccgatccatttgtatcgcctccagaattgaagaagcttcctgcagctagacaattaggaaggttaaaaaagtttggagatggtggaggatagccataataatcattgttgggaggtggaacttggaaggttattgtagggttgaagtccttgatgaagaagaattgagttcaaatgagaggaaaaaggagcagggaagagggacaataagaaaaaaaagggtaaactaaaatcacgtgtaaggcatgtgcagatcaacatcagaaagcatagtcaacctactggtattagggcactgatacctttttgggtcaaaatttttttacaaggtatttcatgaggtagttttgtccatttttttttttacaaggtatcgtctcattttttttttatcatttagtttctcgcaataagtgtatttcatgaggtagttttttccaaaatttcctcatttattataaaatacctcatcttttccataaataatgcaatgtctagacttttacgctgtttacacatgctcctttgaccatctattgacacacaaggaaaaatagagtagagtcatgcaggatcttgttagatttttctcgatatatactttcaaaagatcaatttttttataattttttttttgaggggattttttttttataattatgtacttatcaaaggtcaaagttgtgcaccgggaagcataaaactctatgtgttgcaatttacatggaaggggaggagtataataagagaaaattatggtaaaaggttcattcctggagatcatgagaaaggaagtagaaagaacaaaaaagaacaatgggagtgcttttcaatgtttgttgtacgtagcatttattcatttgctataatgttttgtgacattgtagtggacttgctgccgcatataagctaaagtcccatggcttgagtgtgacattgtttgaagctgatactagagctggaggaaaactcaaaactgttgcaaaggatggtttgatttgggatgagggggcaaatactatggtaatgtttttgattattgcaggtcttgcactttagcgcacaattaatttctggatttttttttgtactgtggtggttatggtcatcaacatgtctcacccactgtgcttgcagatagagagtgaagcggaggtcacgagtttactcgatgatcttgggcttcgtgagaagcagcagtttgtaagtctttcattatctgaatggcacatactttatttcgaaagattgtaattgccttttctttctagatggcttcatcttcatgttgctttctgattcagtttcgtggctaactttccaagtttgtctgattgctaactctgtcatagccaattgcacaaaacaaaatgtacattgcgagagacggtcgtcctgtgctggtaagtttgcttgttttacttttgacctcttttaagatctttcaactctggagcctggaaacatggtgatgcaggaggcaagttctctctattttacatcctttcttctctgtatcttatgacatttgcctcttattctgtgcagataccttcgagtcccattgcacttctcaagagcaatatcctttcagcgcaatctaaggtcgttttatgttaagacatacttgatgctgagagtttattgaattcttaaccttcttcttattttttttttatttttttagcaaaaggtaagtatattgcatttaccaaaaaacagtatgtacaccaccacagcagccatgtcagaatctagaaataccaccgaaaaaatcctacacccaaccagagacagttatattatatcctactcctaagtttctgtacccaatttacatcaatattggtccatttacaagatatttttataattcacagaagcacatcagttttaattagtttaataatgacctctggatgaataaccaactcagaccatatagccttattcctggctttccggaagttgtacgccagagcagcaagcacagcaatgcaaacctgtttcttatacctccttttatgtgtcttagcccatctcttatagctagtgaagatacagtcgtgtgcacaggattgaaccccaatccaactagcgaaagcctcacaacattatgactataaatacatctgaagtataaatgctgcacctttttctcctcttgcctgcacggtatcagaacaaatcccagctttagctaacaattccctggttttcagtttattcaatgccatcatgcaagcaatgaaagaatgttttggaacattcagtttgttccaaacacagtgagagcaagggacctttcctgcagttccacttagccacttatatccctgactaatagtatgactctttgcaccgtaaattgatttcaacttaactttttcataagcagtgaattgtgtgttgttagagtgtctagctgtctaggagattgggagaaaaggagggaccaaggagatagaaacacacctttgtgtttctttgtgtatttactttttagggtgggtcacgttttctgagaaatttgggaaaaggaagaaatagtaacacactttcccatttgtataacctgtatactggagctccaatataatttgcatttttttttgagctgcaagaatatgttgacaaacagttattgcttcttcctcagctacaacttatgttggagccattcctttggagaaaacgctatgcttctaagatttctgatgagcatgctcaggaaaggtaatgtcaagacatgtgttacctcgccttaattttcgttccaggaggtgagcatgcatttagaactaaaaggcacaaagactgttggtggtcttgcctgttcaaatataatggagaggagttttcgctacatttaccctctcttgaagtggggttgaaatatagcatcaagttgaatgcttgattaagtttaaaggacttgtgtaactctttttctgtttactgtgattacatgacctggttgattaacataatggtctgtttatctgtagtgtgggtgagttttttgagcgacattttgggaaagaggtaatggtttaccatagtatttctgctttagtggtaaattgtaatgttgctgataattatacttcgctgcagtttgttgattatctaattgatccttttgtcgcgggtacaagtggaggagatcctcagtctctttctgtaagtgaacattttgtgcttcactcccaattttttggaggctggaaatagattcttttccagttgttctgtcaaaaatagatgtagctttattttgaatttgaagttcccaattgttcattttgactattactgattattgctaagagtggcattatgctattatgctcctaaaagaaaggtgaattttgacctacatatagtataatgtatcaatattggtttaattgtttgttcttttgttccttttggtgctcatcttgcgccttgttctcatcgctcgttttttcatgttgcacttgatttaaatttgctcagcttaacttgtctttttgaatttatattacttattgctatattttactaatttcgttgaaactaattttttgctgaacttttcgttttgttgaaatcatttttctgaattaacttgattttcctgaatagaattgaattttggtgatcttaccttttctgcagccttttatttctttcttgtcctttttccaatctcatttttttatatttccattgtgttgacatcttatcattaactgtgcagatgcgtcatgcatttccagaagtatggaatattgagaacaagtatggaccataagacgtttattttaatcgacatgtatgtttcttagtttatacatatattaattctgtggtaaaaaaaccgaacaagaatatctttttttttttctatcatcaaaaagggtgaatatatgtagaggaaaaagatttgaatcaagatattagcctaaagcaataataatgttagtaatagctttaataacaaattcaaaacgtacattaatgaaccgagaggccggaaaatagttaaagtgaccactaagagaagcgaaggattcatgatgggttttcaacccagtagggcaaatttgttcaatgttctttacaaatcaagcttattaccttgtgggtgtttttgctagagatgaatgatagaattttccctagttggaagtcttttttggttactttatgggagctagtgatgtaatttgtttcgccttatggcatttcctaacatgtgcttttgtgatgtattgaagctttttttttgccttaatttatgctggattttaattttgttctttgtttcatttttcttgcttttgaaaaaaatatatagatatgtatatattaggattggtcgaggattttgagggaagggaaagacctaagaaaacttggatgagggtgattgatagtgatatgagtctatttgggatcgaagaaaatattcctttggataaggtgtagtggagggttgagggagcaaatttatgcagattagcttgacttaaagtttttctttttgattatttttcatttacttgtgttttgcaaacatttactcatgaatgatgtaaacttcttcaaccaaatctctggaaaaaaataatctacatggaaaaaacattattaatgttaacttgacagagatcccatccttgtgaagcagctagcaattaggcatctaacaattgacattttaatggacaggatagaatgtctcttgatagtcaataccctctgtttcattgtatcccatagctactaatctagtttgtatctttccaaagaaccattattttgaagtttcaccttgaacacccattttgaaccaatatgtttcttgcccttggggagaggggctaattgccatgttttgatgcggatgcaaagacacttgttctacctgagcctattgacttgatcatggatactctagggtttgaactcaagggaaagaatcaagtcttggcatgtgtggtgacatggcgtggggatggagtaaagaagagtcatagttctgttaggatatgttcttgcttgctacatagaatcgtagttctgttaggattgctatgatattatatctagtagatagattttatagttaattaggataaacatgtgatgatcatgttataataggcatgtgattagaggataggattagcttaattcttatcttgttgttagtttaattcttatcctagttttatgtttatcttagtcgaagttgtagccatataaagggcgttccattcattaataatacttagttttgctttgtgttttaaacatacttcttgattattgtttgcttgtgagctaactaatcaaaccattaaagacttttcaggagttttagtgctaaacatcttaatttcaggagtgattttaagagcgtttagtgatcttgaatcaagaaatatccttgttcttgttcgactaatatcagtggttttgttcgagttcttggagttaatctcttcaagattcttattcaacttgattgttgagcttattggtttagtaatcatatcaagtggtatcagttttccagggaggagaggatagataggattctctttgatcaacaaagatccaagggctatcaacaaggttcaaacattgctgcttgttcaagacttgatctttttctaccaagatgcattctttacgtcacaaggtagtaataacaagattaagagtggtttttacatccaagaatcaatctttcacgtccaagatttcatctttcacgtctaagattcattctttaagatcaagaaagttataacaagcatagaagaacacataaccatggagtccgagatggacaagcttgccaaagctatgcaagcacttgcaaagtcgcaaactgaatcacagagtcgactcaatgagaatactaccacaatcaatgggattggtagtaacatgaataggttggaggcacgcatggatgccattgcaaccatcatacaaaagaagcttgatcggaatagtgccaacttcataggtgccaattcagaggaagagttggcagaacgtgaagaaagatcatccaagactacatacaatgatgatcgtggcttaaagttggatgactataatggagatagcaatcgagaagacttgttacagtggattcgacaacttgagaaggtatgtgattatagaggctttgatgacaagaaaagattcaggattgcctccataagactcacgaaatatgctggaatttggcttgaaagcttcaaggcacaacgagccaagaaaggtaaagaaaagttgtgtagttggacaaagttgaaagttcaagcttaaagagaagttcttgcctagtgactatgaacaaaaatagttcataagactctctactataagccaagacacgcttagtgtacatgagtacaccatggaatttgacaagctagggcttatatttgacatagaggagaaagaacaatggaagattgcaagatacatcaaaggcttgaaccgccacattgccaagaaggtggaagtatccacttatcacacctttgaggatgtgacaaagttggctaagaagtttgaagaacatgagaaggaagagaagcctaagagttcttacacgcctaagtatgatactaatgctaaggccaaggctagcttcctactcaaagtggtatgaaggacctaagaggctaagaacctcaccccacctaaagaagacacaagagttgagaagcctaaagtcgtcgttccaaaggagaaatttgaagagatgagaaagtgcttcaagtgtcaaggaaggagacacatagcaagcaattgtcctaacaaaagagtcctcaccatgagacaatacctagctttgcaagaagaggaggatgtctattagttcgtccctgatgaagagcaaacttaggggaagaagaggaggaggatgcttttgctgaggatgatgcaaggctagtaggggtcaagaggcgcaccttacatgtcgaccatacacctagcatggagcaaatggaaaaatcttttccacactagatgcaaggtaggtgactatatatgtaatggtataatagatagtggttcttgcactaatgttattgtatctgaggtagtgtcaaagctaaacttagctacaagggcacaccctaagccatacaagttgagtttgctagatgatagcactggcatgagagtaaagaaacaagctttgatttcattctctataggggttataaggatgagttatggggtgatgtattgcctatgagtgcatgtcatctcttgcttggaagaccattgcagtttgataaaaaggtcatccatgagggggactctaatgtgtactctgtgttggttggttctaagagggtatgtttgcatcccttagctcctcattcagtggcgccaaagcaaccacctaagacaccaagttactttctatcttcaagggagttcgaacaagaggtggaggaagaaggttgtgcttatgccttgattgtaagacatgctgccacaagtgtcaagactactagcaatgagaagctcgaagccttgatgaaagagtttgaggatgtctttctagaggaactacgacccttgagaggcatagaacatgctgtagaccttgtacctggcgcccctttgcctaacaagcctgcttataagtgtgatccagtggcatctagggaattgcaacgccaaattgaggacctaattgaaaagggctatttaagggagatcatgagtccatgtgttgtgccagctttactagttcctaagaaagatgacacatggaggatgtgcatagatagtagagcagtgaacaacattacagtcaagtaaaggtttcctatgcctagattggaagatatgttggataagttacatggggcatcaatcttttctaagattgatcttcgaagtggctaccaccaaatgaggatcagagaaggtgatgagtggaaaacaacattcaagaccaagcagggattgtatgagtggatggtgatgccatttgccttatgcaatgcgccaagctctttcatgagcttgatgaatgaggtacttcgtccgttccttaacaagtttgtggttgtttacatagatgatatacatatctatagccaaaatgtggaggaacacttgttgaacttgcgtagcttattcatgaagcttagagagcaccaactctatggtaagattgatggcgacgaggttgacgggggattatggcggcagtgaatcaccctctttgccggtcactgaaatacaacctgaggtatctttaaattctgtaattggattgactaacccaaaaactatgaaattgctgggaaaaattgctggatgtgaagttgtggtgatgattgaccctggggcaacccataattttttatcactagctactgttgagaaattagctattcctgtgtcggaatcggaaggatttggggtttctctaggggatggacaggcggtgaggggtagtggaatttgtagaggggtgttattgagtttaaatggtggagttgaagtggaaacagattttcagcctctgggtcttggtaattcggacgtgattttgggtgtacagtggctggagacgttggggacagtggagagcaattggaaaacacaaacaatggggtttgaaatcgagggtgtcaagttcactttgaaggtgacccatcactggcgaggtctcgaatctcactcaaagccatgatacgtaccttatgtaaagagggtggaggtttgtggcttgagttgaaccagattgagcattatcaggagaaaacaccgcattcatcagccttacctgaaattccagttttcttacagagagtccttacccaatttcagtctgtgtttgctacaccagaaggcttaccaccgataagagaacatgaacatgcaatagttcttagagaagggtgtaatccggtaggggtaataccgtaccgttatccacagttccaaaaagatgagatagagcgcctcatcaaagaaatgttggcttccggaatcatcaatccttccacgagccctttctcgagcccggtgatattagtgaagaagaaagatgggtcgtggcggttttgtgtagactatcgggccctcaataaagaaacggtccccgataagtatcccattcccgtgattgatgaattgttggatgagcttcatggggcaacacttttttcaaaactcgacttaagggccgggtatcaccagatccgggttaaggccgaagacactctcaaaacagcttttcgcactcatgaggggcattacgagtttttagtaatgccatttgggttgacaaacgcgccggcaacgtttcaatcccttatgaacgaggtcttcaaaccattcttgcgcaagtttgtcttggtatttttcgacgatatattggtctacagtagttctgccaggaacatgaggagcatttgaccttggtgttgcacaccctagcagctcataaattgtttgtgaatcagaagaaatgtgattttggcaggtcggaagtagcatatatggggcatatcatctctggtcaaggggtggctgtggatatggagaaggttcaagcgatggtggaatggccccttcctaaaaacctccgggaattacggggatttttgggccttacagggtactaccgcaaattcgtacttcactatgctcatatagccaagcctttaactgatcaactcaagagagatgcgtttgggtggtctgaggcagcaactcaagcctttgaaaagctcaagaaggcgatgatcacatcccctgttttggcaatgccggacttccaagagttgtttgtggttgagaccgacgcatccgggtatggtctgggggcagtgttaatgcaaaacaaccgacccattgccttttacagtaagttgttaggtgcccgggctcaattaaagtcgatctacgaaatggagttgatggccatctgcatggcagttcagaattggagatattatctgctgggtcgacatttcctcattcgtacagaccaacagagtttacgtcatctcactcagcagcgagaagtaagtactgccttccaacgttggatgagtaaacttatggggttcgattttgaaatacagtttaagccggggtgtgccaaccgggtagctgatgcattatcccgcaagacagtgggagaggttgaattgggtgcgctgatattaactcatggggtggactggaccgacttggagcgtgaaattgaaggcgatcctctgttgtgcaaaattaaacaagacttccacgggggtgctattactcctgtgcacttttctttggtggacaacaagctgttgttcaagggtcgatacgtgattcccagctcttcggtttttattcctaccttgctgcgagaatatcacgattctcccattggagggcattcgggggacctcaaaacatatctcaggatggctgccgactggtattggaggggcatgcgcaaggatgtggcgcggtatgtgcaacattgtagcgtgtgtcaacaacaaaaaatgtctcaacagatgccagggggggtactacaaccactccccataccttcctcggtttgggatgacttgtcaatggacttcgtggaaggcttgccatcttccaagggggtaaacaccatcctcgtggtggtcgatcgtttgtctaagtacgcccacttcctcccactacgtcatccatttactgctgtgtcggtggcaaatgtgtttgtcaaagaggtggttcgtttgcatgggtttccttcctccattgtttcagatcgggatcgaatttttatgagtgtgttttggcgggaattatttcgtttacatgacaccacactcaaacgaagtaccgcgtatcatcctcaaacggatggtcagtccgaaatcgtcaatcgagctctggagacttatttgcgttgctttgtgggggaatacccgcgctcttgggctcagtggcttgggccgaattttcatataatacttctcctcatctctctaccaaaatgaccccgtcaaggtcctttatggtagagaccctcctactgtgatacgggttaatcggggagcctcacctgttgaaagcttggaaaacatgctccaagagcgagacgcagtattagatgccttgcagattaatctgattaaagctcaacagaaaatgaagagtagtgctgatgctacaagaagagaggtgcattttaaggtgggagatcgagtgtacttaaaattacagccttaccgtcagaaatctttggcttaacgcccttatgagaagttagccgcccgtttctacggaccatttactattttacagaagattgggcaagctgcatacaagttacaacttcctgtttctagcaaggtgcatccggtgtttcatgtctcccaactgaaacaggccgttggttccattcccgtttcagccactattccagagcaattgtcttctgacttggagttagaggtggaacctgatgaactcctcgatgttcgtagtgtttctagaggccagcacacttacttggaagctctcattcagtggcagggattaccatcattcgaagctacctgggaagatgtggctgctttccatcaccattttccatccttccaccttgaggacaaggtgaaactttgggggggtggtaatgtgatgcaccaaactaccactccactactcacctattagaggcgtaagaaaaagggggtaaatcaggaatagtttacaaattctgttgaaaggaatattttgtaattatgatgtcagaggttgttagcaaaaaggcagtagagtaacaataaaaaggggaagggaggagagaagaaggtattgagatttttgtaaggaacttggcccttgggagagttgggagcctctcgaaagctcaccattatcttgtgaatattttccttcctggttatatacaagaaccttcctctgtcaatttcttttctctctaatcttatttcttattctgttttctggttgccattgtttgaagttgcttgttgtgcttgagtaaatacgtgaagtggtgaaacccatctgaattcatcacatctattccaagtggtataatacaagcttgtaatccaaatctaatgagaaatctaagttatgaagaatttcaaaagaactaagtacccttgttttggatgcccaaggatttacttgccgctcaagttaatgctcaacgtgcaagatacaacctctttagtatcccaaggtagtttccataagaattaattgagctcaaatcaagaacaatatttttatgtattaatgtgaacacttcctgaattatattagatatatggtctgaaggttggaagaaagattagcttttaattttaagtttgagatagtttttagaatcgaggaaagattagctcttaacttgtaaactaaggattgctttataagtaaaacattagttatggaactcttaaaattggttttgaacatttctagttaaaaatcccatgtaattctcccaaactagcttaaaatctcacatttcacaagctaaggagagacaaatggcgttctcttgtgaaacaatctaaaattttcattaggctactgttttcaagtatttatatgttagaagtgccgcatataggtacataaaataagtttacaaacacaagtaggaataaggaaaactaaaagagaaacttcagccatacaaaaccggctgaaatcagctactactttctactttctagcttcaaaatctgattgcaagtctcctttaagccaatcaccaatgaaaacctttcctccacatgaagtgtgctcaaatcaagagaagaaacccatcattcgcctatagctacctgggtcagatgaagatacggcaaaaaaaacgctggaaatcagtgaaccaaaataagcaccaattggatgctttctgtccttgctacattttcttctcataggactacttcaagccatacatgaataagcagttagatccagctcctagcatccatttgatcgtacaaatgagctccaaaaagataagtaaaaccaagcagccaaaacctaattaatactaatgatgaattagttgaatagctaatgacgatgaagcaacactttagtaggaatagtgttaattatgatcaatgctacttaatcttctgattaatttttggaaaaatgtcatatctaccttctgtatacacttattcataactatatcgtattattattatttttaaataactaccttttaagtaccaaaacctaagaaatcaggcacttgatggattccatccaaagatccatttggcggggcccactaactgacttttgattttttgcctttcctcttttggttaatctcaatggttcatcaataacaactcaatcttctccccatttcatcaaatcatccctaaatcagaactttttcaaattcacccaaatgaggttatggaaacctctaccaagtttattcgaccacttttagtctagctcaaagttttacacttgcttcaaaaactaagatttattaactttagaaattaggtttttatttttattttttatttaactttgtaacaatcttaaataactcaggtgctttctagagtttggctttaattgtttttcccttggttatgtgaaagaagtatgactactttctccaagactaaagtagagagcaaaaaatgcaattctggaatttcttgcaaaagaaaaggaacgagttaatgataatgaaaaacaaagaaaatgatgagaagagaggagctgaatcaatcatgatcatgtattttaaagttttttttgctattgaagtgacttaagaagaggaaagaggatgagtgaagacaaacaaaagaaaggataaatagagggaaatcttgggcttagaaaggtgaaaaggtaagaagatgagttagtgggccccaacaaatgtatctttggatataatccgtcatgccactgtttggggcttgcttaagtccatacattacttcactaattttacaaaatttattttcttgaccaagaactgaaaaaaccttcagtggtgatctattaggttttggaagttaaaaggtagttatttaaatgtttttaatataaaaggtagttatttagatatttttaatataaaaggtagttatgtgaataaaagtgtatataaaatgtaattttttgacatttttgccttagtttttcttgctaattcaccttttcaacttgaccaagttgctatgaggagaaaacgagcaattattaagcaaatcgcaacactagcattaatccatggcccatgaaactctccataattagagattggattagcacttagtagaacttcttgctcctgctccaggtttccattacttctttatctaagtgcatcaaaaggttgttgggttatgaaaggtggtggttgtgtatagtcattgtcaaaatgttgttaatgcactctatttagaggatgagggattgaatagttttcacctcgtgacctttcattcctttttaaaaaaattgataatgtgtattggtcctatgactgtatgaatggtaataagctatctcatgagctgttactatcttcctcagagtctaggtagaagggtttgggctgataattttctactatgtgcaattagtttgttggatttggatatgctagttgatataggtcctttcccttgggccttctcttaatataggcctacagtgtgattgaagataaatcttctggagaatataagaacaatgagatggattggttagaggttgatttgttcttttggtgtaagactatttcgggttctctattggttatgttcagacgccagaatatgtgttggtgattgttttccatgaacatactttatccgcagagacatttttcttttttcttcctataagattatatttgtttcctctcttggtgctcatctcagtgtctctactttacgttaaactgttgacattacttgacaatgcgtatatttgtcgcatggtgctcttccctcactccacgtcgaccccatacatcaaaaaatgccattaaagaatattcgaactcacaaccttgtgttgaaagaatggaatccctaccaatgactcattaattcattttctctttaagaaataaatgatttcctcacaaacttttaggctttaagagcccaaaagataaaaacataaaataagatagacatcaacgtcaagattagccttaaatgcacaaagcacatgtcaaatgattgataactactcacgagttgcaactctttgggcgttgcctaatattaattggatctcttttaaaaattgttggtggttatggttggtggagaggaccatgtaacttttagctggtcacaactggtaatgattgtcacttttactgcccataaaaaaatttaaactgttgaatatgtttctggcagtggatctgacaaatcctttacaagttggcgtccattttgttttgccatgtgactcaattataatacgtgagttttattatccaccaggtttggctcactaatttccggattaattcaatctaaactgtctccaaagaaggaaaagggtggaggaggaaagccttcttctaatgaaaagacacgcatacgtggttcgttttctttccagggtggaatgcaggtattagcatgtagctttcattctgttaacatttgtggttcttccagacatacatccaatgctttttttttttcttgctataaccataaacattcttgtcatgaacattctttaatactgttgctgagcttagtgtattcgttcattcatgtaatttcctctcttgaggttaaaatggcatacagccttacaacctatatccataatgctccttagagtagaatccctaggttataacatagtaccacttatcaaaataaacatggcacacactgcaggacaagaagtaaatccacctagagaactgagcacctagtagtaaaagcagcgatacattactaataacagtagcagggccataagagtagtaaatgggcctcatttcaacactccccccgtaatggtgagagagaagaagcagtctgaactcccagcttggagagcaaaatagagtgttgctgaacagggagaaccttagtgaaaacatctggcacttgatcttgagatggaacataggtaggctgaataaccccttcttcatttgtattgtccctcaggaaatgacaatctatgtctacatgcttggttttctcatgatgaactagatatgctgctatggcaagagcagcttggttatcacagtagataggagtagcactggactttttaatgcgaagatctttgaggagttgtttgatccacatcacctcacacacagcaagagccatggatctgtactctgcactgaccacaagaaattgcctctttgactttcaagatacggggggagtcaccaaggagcacacaaaaccagatgtagaatttacaacacccatcccattcactatcacaaaatgctgttagttgagcactagacttgttcgccatgagaattcaccctgttggcagcttgaagatgcacattagtggggcagtgcataaatttgcttaaatcatgtatagtgaaggcaatatcaggcattgccttgtaatagtgagataaatgagcttccccatcaatttttgatacacatcaggttgttgaagaggatcaccattgtcagcatagagcttgacatgtgagtccatacgaagcctcaatcgtctgcaatttataaaaccatattcatcaacaagacccatcacatacttctttagagataaaaacgatacttcactacactgatccacttcaatcctcaaaaaatatcttaggccacccatatctttcatgtgaaattggccagcgaagaaactctttgcttcctcaatagttgctaaactattgccagcaagaatgaggtcgtccacatacaccaatatagcactgaaacagtgagagttttgcttgaagaatagagagtagtcacacttggattaagtgaatacattttgctttaaagcagtgttagcttggcaaaccattgcctcaaagcctacttcaagccataaagtgacttaagcagcttgcacaccttagttcatttggtgtcacttctgccatcagtacttagctccccctctccttgaactttgatcctgttacatgtttcactatatcctggtgatagcttcatgtatacactatcctacaattcaccatgcaaaaaagcatttttaacatccatttgtttgcaagaaccaaccctctaaggatgcaacaacaagcatgtggtcatctttgctacaggggtaaaagtctgctcataatctattccatatctctgtctgtcacccatgattacaagccttggcttatgcctattatttgtgccatcagtgctgtattttgttctgatccatccatgtgagggatggctcatttctacaaaatcctagttccgttaggatttgtgttgttttcctaattctagtaggaataggactcctaaaatcctaatcctcctagttctgttaggagtttaaaagttttagtttgattgtaattctagttgtgttagaaatccaaatcctagattcatgtcacgtatggttagaacatggctagtaggataatttgtcttgtgatgtccatagccttggcatttgtggcacctaactttcaatagcttgtcttctgtctccttttctttctccttctttgaggaatcaacgtttttagagctatctaaaccactagcatcaatattaggtttaaaagtgctaaaagatttcgaatagttcttacttgcatacaatttctttttctagtttatgtagcgtcaccagggaacaaaaactcggccgttccgttctggaacggccgctttgtaacggatttcagagaggccgttccgttaaataccgttctagaacggtgatttggaattcacaccaaactcggcgcgatagcgttacgtaacggtgtaacggcgttccagaaccgttacaatcacataacgtccgttatttgaagaagaccagttcttttggtggaggaagaagaagagccaacgcaagatctatagatctgagttaaaatttgaaaataaaacatgtttttttatttaaattaaagcttacagaggatgtagaactcaaattcgagtaaacccctcctttaatttcattaggttactgcaaatcgaaccctaaattgcaaaccctaatttcgaaaaaaccctaatatgcattgggatgcaacgctgcttctccggtcatggcagagaaggtcgacgagtcatcttcggctgcttttagcactgtagctgccggtggttggcttgtttgcaggttagtgcttgctggttttctttctctcataccgatcatcttcttcttttctctcttctctttttcttttttattgtgtgactgccagtcacgtgataattgcaactcataaagtatctctttctctctcttcttttcatccctttttatttttctttcccttttagtttttattccctcacgtggaatcacctaattttcatccttttttatttttttagttacactcttacacagaagtatgttcaaatatcattatagtacctcaaatattgtatttataagagttttggacataatatgatatagaaagtaaaatagaagaaaaataaagtttaaatgtcacttgtgtgatttttttaaaaaaattcacgccgcgacggccgcgaaacgttctatttcccgttacaagccgttcccgcgataacgcgaccgttcccgcgaacgcgaccgcgaccgcgttttttttccttgagcgtcacatcttgcaagcttcttcaaaggtgagttatgtgtacaactccaatttctctccaatcccctccgtcctcatttaggcctccaaggaagctacttaaacattgatcttcaagttcatcaattttccaaagaatggataacttctcgaactcctttatgtaatcttcaacggacatattcccttgtttaagagtagaccattccatgtacaagctttgtttgtagttagaaggaacaaaacgtcctcttaacaactttttaagcttatcccaagtagagattttgggtttattagctttcacacgctgcctctttactccatccaaccaaatagatgcatatttggttaccttaagcacggccaccttgtatttcttttcttttggtgtctcttaatcccaagtagagcttttgcgtgtgaaagctaataaacacaaaatctctacttgggataatcttcttcttgtttccgaaacaactaattcttatggtagttaggaaagcaagaatggtttctaattcaatagggaatatattaattattattagtttaagttaaatagtgcacgaatctaaatagattattcgtctcaaaatctcacttaagtatagatttgtttggacatctgagggaagaagaagagagcgagataaaggagaattatcactcaatgaatccatatcccgagttttcccatttacttctttgaaagcaatatagttcacgaggtcttattatcagtctatggacataagagtaataatttaagggcaaaaactatgactttatgggtttaaactgatacatgttctgttaaactgatagatgttctgtgttaaaccgatactcatatattcctggttaaactgatagatatatgatttaaattgatacccgtctcagtcatgtcttggattgagacggtctgacacaagactttttgtgtattatatatctgattagaataaatttatcctgtttactaattattttatcttctccagacacttgttgacacaatatgcaatcagtttggtaaagatgaactcaaactacagtgcaaggtcctttcattgtcctacagtcataaggggatcccttcttcagaaaattgggtcgtgtcttctgtgtcaaaaaattccattgaagatcaacaatatgatgctgtcatcgttaccgtgagttttactttgcttactgctattgcaccaatctttcttcttttgacacactgataatggcaatgctgttgtggtttgaagccatgttatggggttttagggatatttatggagtctgatctaatatgttattggataaaattcagatctgtaacgtgactcaatgagattgaaaaaaattgaatcaagataatggattggaaaattaggagctaacctagggtctataagcgatccacttggagtctcataccaagcaggtattcgacattttaggtttatattgctgctatggctcatatgggagcctacatagggtctggtgcttattcctttttcttttgtctagttttggggctgcacatttctgttgtgttttgatatggatagccatcacctgcaattgcatggaggctgaactaagttctataggggagcaaacagtatctgttggaaatttattttcatattgtgtttttaaatgctataatccaaaatttgttgttcccctaaaatgcctaaaatacccttatgtaactgctccatctgtcccttaatagacttcccatttctccaatgcatgtttgccaatacacattttgtattgttaatatcaaaaattacatattagtaaaaattataaaagtttgattttcctaatgtacgcaatgagacgaatcaaacaagacgccatatgactatgttttttcttatacttcctatgttttttaataagtgacatgttttccttttagggaaatgtcacaataagtgacacatagctcaaagtagtaaaaatacttctcatttattacatctttgccattatttaattgtttcacctacctactttatccaatactcaaatttgattggttgaacaattggtcccaactttctctagactccttggtattccctttcccccactttctctctgtgtcacttattaaaaaatggaggacgtatattggaaaaaaattggaaggttttcttcacttatgaatagtggtaaaattagagatgggaaggctattttgggatggatggagtaatatttaaatttttaaaataatgtcattgttttagtgatgaaataaaattcaaggctattttttctagtaattatgttatctgtacatcaccacacgtatcgcgtgcatataagactagtttgatgatattccaacactgttcgaaggaagtcaggcatggaaccatgtttgcttccatatgggaaatattttgcttactctccttcaaacatctacctcattatcccagaatgattgatcgaatctaatacaaatatacaattgatcatatgccaccagggaattacatcaaattaaatttttatagaaggggaatcagtcatagcctcatagggaacgaataagtgatactcgccagtttctttcctggttacttttcctcttctcactagccatcctttatgtatgggtatgctgcatcattcctgccactggttgggactcccgtttgaactatggggggatgggaaagctaagccatcatcttcaaattgagtttcttgagaatgtaagacaccatctgtaagatgaatatagtgcactctatagtcaatgtcatgatctttatgggtttatctgctgaaataactgtgatatacccagctctccatttacaaagttttcctacatattaaactcttgcccgcaattctagaacttcattgtagaacttttcctacataagcatcatttgtcttttctgtagtaaaagttagaaagagctttattttagaacattcgtttttagttttctttgttgttgattactccgccacttttaatacttttatgattcaagtatttgacaaaatcatgtaatttaggtcctctgctgcatgcagtctataccctctctctctctctctctctctctctctctgtggttgtgtcttacttgttgagttactaactccagccattacataaagtaggctggcattatgatgagcaaattactcaagaccacatgttagctcctttttcttttctccttattctgaaaggcaaatataggtccatcttggtgcttctcatgtcataagtaagctgaccccctccttttccagggaataggacaataatccaaaagtgagggttttacatgttgggatttgtgaagtttcttattttacttaatagccgagtcagtgttacaatacatagtaccgtgttacaaaatagtatgtaacaccaagcatgtttatgtgcaaaattgtgcaagactttgttgctggcacgccaagggctgttttaatgtagtttacttattcttttaggtttttcagatgacaatcataaagggaattaggagtgtttttattgtagtcaatccctattgtgctacaacgataaaagaaaaaagcacaagactagaaggagaagtaatgtctaggaaagactcctcacctggggttgctagtcacctacacatcttagaaggcatcaaaccaaagcttattcccctcgactgttttcgggagaaaagaagacaaaattgtttctaacttatactttaccagtttcactacagcatcagaaagaagcaaaatatgctcccacaacacggcgaacctagctttccagatgtgataaaccagaccagcaaaatgattattttcactagagctttgagtctattttttcggtttttccccttcttcctggtaatgtcacgccaccaagccatcatctcaattttttgagatttgacgtaatcgctcaaatagctgagtaagacacttcttgctctaaatactaataaaaaagaggtgaatgtgggtctcagccatgttactcaaatcggataaagtgtctactcttattagggtttttgggtgttggactcatccatttttttttgtaaaatgtcaagattttggtttgaaatgagagattcaagtgtcgtgacatgagtcggcacgcaacacttaaacgtgtcgaagtaacagagggtctcagacaatcaactttaatcaatcacgaaccccaaaatttatgcaacctttgctcatattcagtctctgtaaagcactcaactgcagcacacccacccattcgcttcacctacagcaggagggcacccaagtaattgctatgatgagcgaattattctgttttgccttgctggaatattgctgttagatttgctgactcactggcagttaattatagtcagagaatgagaaatatcctgtagagagagaaagggtatcttttgtatttagctctataaatagctaaggaagggaagggcattgagagtttatgatattataataggagagatttagcctctcgaatgctgataggagcgtagctcttgttggattatcaatactactctgtttgctctatctatttctactcaggttccttcttgtacagtggatccctgattggatttacttcatcaaccagcagataaaattatttgtaggcacattgaaaccattccaaacctaatgaggccaaagtttatcacaaagaatataggagccaaatgtaggcaacagataagagtataattgccagaagttgaagactccaggtattgttcagaaaccttaatgcatatcatcattctgacactagattttccccggagccaactaacaaaaatgaattaaagagattaaggctatgtttagttcacctgaaattttctgatctgaacttatctgatctgatctgaacttattttttctgatctgatctgatctgatctgaaccaatctgattacaagatcttatcttttagatttttctcaatatataagaaaaaatatagtcatgtggggtcttgtttgattcgtctcaatgagtactttattaatattcaattattataatttttactaatatgtaatgaaagatataatgatttttaaatataagcatgatctgaactgatctgatgtgaacttattttttctgatctgatctgatctgattagatctgaaataagcaaaaataaggtgaactgaacatagcctaagcaacaattgagggaaaataagatcattatggctaagataagataaatatgtaatgataaaatcagagtaattatatcagttacactctcaacattcgtcagattgaggtttcctcccaaaatgccaacccacttttctgtattttcacgtccttctctctacccttctaggtatatattacatcagctgtaaaatttttgaaccaactagtagaatactgatctaccctcaactgcctcactttctcattttttctgggcctttttctctctagcacaagtccacataagtgatgcatagcagaaatataattccactagtcatcctcaatattgatataacaaacacatcacccacatattatcatttttaatcgctgcatgcgaggcatacttacccaccaatcaggatatgcataacagcgttcctaattccaaaaccaccatatatcttgggtttgcaactctcatccctagcaacaaggggactttctgaaaaagtggcagattccgcccacaagtagtttgtacggacacctttattatattattaatatcatatttcggcaacacaaattaccagcccagtaaaacatgaattgacatgagactaacaaggggcccaatctaatatcgtacgtctgtactaagcaatgtataaaaaaaagctcaaggtgcattgatgcaatagggatcctaatgtgcataggtgcgcctcattgaagtgaggcaccactaaggataaataaaaaagattgatgtaaaattaaattgtgcaccttgggtgcgcctcgatgaactttttttgtgtgcctaagtgtacctcaagtacgcctcattgatatcgcctcgcctggcagaaaacgagcttgaccccaatcgccttgctccccaccgcctaggcgtgcctcagtcacactttttaaatacattggtattaagtactcagaatggcaaaaagaaactttgggcattaattagacatttcactttttgtgcaactatttgtgacttcagagattgatatgttttctacattacagacttttgtgatggctgcatggtctccactgtcaaagaacattagtttaagtagaagaaatattgctctattaccttcctccctctacaaacaaaatcctaaaatgtggttatgtagtgccaattcaaacttgtagatgcatgactaatgctttcattatgctgtgggtttttatactatgattcatgtccaattacataacaattagctggagtcaggatatgtcacggaaattttaagcctggcaggatgattgtttatattttctctttttcggtgtttaagtcaaagtaaacttctaggctgctcttttataggctagttgggctgttggggagatctacacattaagtgtgaagaaatcttgtctaactccagtttggttgagaactgtaagctgtcataacatttgttgcatgatgaggccttgtgggattatcatgttagctgtaaactctaaacttacttgaaatctagtgttgtgtctccttatttctgtagtcaaaattgaaccttctgtacgtttttgatacctgcgactagaatgatggaattctgaattactgatactattacaaccatctgctaagaacgaagatgactcttagctaatttctcagcagatttagagaaattaagaagaattactaatgaatatttaaagagaaaactaccaagatatgattgtattgatgaaaaacaccaattacaacctaaccaacattcgagaggttggagctctcccaagtaaccatttctctcactaaacttatcaattttcaagatgccttttccattctcagttcctctatatttatactactccccttagcaaactacccaacttattccccaagtaaactaaagagataatatctaaaatacccttccccctacaataatattagttcttagcattaccggccccctaaacttccaccttgtcctcaaggtgggtcgtaatcatcactaaattctgggcctctactcgtatattcagtgtcttgcagcccttcaggccccaagcctaggttatgcagctcgtgttgcggctcctcctcatatagttctctggctggagtgagtgcctcaactataatgaaaaagtcctggaggtggggaaggaaggagtgtctgaaatggtgtggtgtgctgctggtgttatgggcttgtgcctgaaagttttgggtttaaagagatggagtggagaagagtggagaagtgactggagacgtaaaagaaggaatcataatttttgtaagtggtgggttgaaaaagttggtgggaagaattgtttttataaaatgtagtgtaatggtcgaaaaatgggtggagtaagtatggtttttggctggggatgtggtactgggttgaaaataaataggtctgagcttacttgtaaaattggcctcaacatgagcaggcccaatatcttgagccaattccccaaaagctggcaatagagcactcttaattgcattgttgtgggccatcgggctccaaacatatattcggaggagccggacttctttggtgatgtcattagcttggcccattgcacactttcccttaacagcctcaagatcttttcccacttttgtaccccaaccacgtggcttcaccatcctttctttcttgcttttgtcacttttttggcaatatacgagtttgtccttactaccctcatcttctaatgttggcttcctcaccaagcttaatttctggaattttgtccaccaaatcccaccacccatcgtcaacaccatacctatctacaccggccaagaagcctggtcctccacccgaattttcgccacagacaaagcctgaacaaccgtcagttctctcaccggagaagttcacaggtccaccacctgacccactagttgctgatccacccttcacaaatctccctcctctggctgccacaagtagtggttcctccgtaatactcatatttctcgtccaagagccctggaccaccaccggacccacttccaccggcaccaacttgttcaaatgatacttctctttcttttccaaacagcctacttggactggaaaaaccactgcgattgtagcctccgccagatctgtagcctagtgcacctaacgtgcttccaactgcaacccaatagggatggaaatggatgggattcggggagggtggagcatcacccgcatccgtcacccgcatccattcgctccacccgctccacccgcatccatccatccgtcacccacgggtgaaacgggtgggtcggtgataaacgggtggaaccatttagggggtgtttggtatcatgtttttttacaaaagaaacagaatcaagtaacaaaatccgtttctacttgtttggttctatgttgctcagactcgagtacccatgtccgacacgggtacgtgtccaagtgtccaactcagctattttctagaattttttatattttttaacccaaaacaaagtgtccaagtgtcccacccatgtccgactcccgaggatccgacacgggtacttgaggtgaaatgaagagtccgagcaacggaggtttggttagtgtgtaaagtaacaattaccgttacttgaggaaaacacatccccccaagttgtttccattcaaaaacctaaggaaacaaataacgtttcactcctcaaacaagaggaaagggaatgggttatatttatttccattccattaggataccaaacaactaataagggtaacacttattattatcctttcccctccttatcaaaatcctttccattccgtttacggtattcataccaaacacccccttagtatattttctaatgaaatttgtgatatgatatgcatgatataaaataattctatcaaaaatataaaaagtaagtaaacttacatgtacaacttaatagatgggtgatgggttggaggttaaacgagtgatggatcgggtgacgggtgaagaaattctcacccaccactcgctttccatccatttaaattaggtttttcatccatttaaaaaaccgggttaaacaggtgatgtatgatccatcacccatttccatcctcaaacacatcccgatttgtttactgcaccaccagatccaccagtataaccacccgaaaaatcatcatgccttctactagccttgtaacctgctcccggtgagaagcttcttccacaagtggtggtcgctggacctccatctccttcttccccaaaaaattttccatgacacccactcgacccttcatctgtgacaacctcttcttcgtccacctctgaagttttggggtcgtcttcctcctcaagctcctcttgaagtaactttaacttccgttggatgggagagaacgcttcattgattatcttcaccagatcttcttgaagtttctcgaaactttttctcacgttttcctctacctctttcgtgatttcctttccgatctccttcatttttagactaggagctcttgcgattccatggcagatttctttttttaaaacaagaaaatcaggcacttaatctcccagaatagtggtgctctgataccattttctaagaaccaagatgactcttagctaatttctcagcataacaacaaatttagagaaattaagaagaattactaatgaatatttaaagagaaaactactaagatatgattgtattgatgaaaaacaccgattacaacctaaccaagaggttggagctctcccaagtaaccatttctctcactaaacttatcaattttcaagatgccgtttactactccccttagcaaactacccaacttattccccaataaactaaagagataatatctaaaatacccttccccctacaatattagttcttagcaccatcaaactgggatggatggttttgtaaggttccaatttacttctccatcaaaatattttaggattttttatctcatgtattttagagtttcctcgtccctttttatctgataagattcttctgatgatttgattttatggtaggctccaatcagcaatattaaagaactgaagattctgaaagctggagttccattttcacttgacttcattccagaggtttgtatttttatagtggttagacatgcttcccctagttttcaaagtaaaagcatccttgttgtgacgatattttttcccttgtttttgtttttattattatcatcacttatttccattttctattttccatgctgataagatgttcatcaccataatcttgtggtatcagaagtgtttagtggagtttattcactacacatgcagttgttcttttgccatgaccgccattcattttctcgtcaaaacaaatctatgaagtttggttttcagactcatggttcttgtagctcttgtgaatttttttttcttctccttgcatgcattcttcaaattacatattgcatataccaggtgctctcctttattttatatttaatttttaaaattctatcatatattttttaatgtcaaacctcaaactaggggttcactgcatcttaggcttaccaggctaatatttctttacttaaccttttccctttatatttgctatcctcttgtgtagtaatcaccataagaagggtacaaactaaattaccctcccattcttttgtatcattctgaaatagtgtcacagagctttgatttttttgccctcatttaatctggcaaatgttctctctatttttttttttttactttcttttgacgggattctcaggcaattgttacggggagcagccagtcacactgtttctgtttattatgcaggtgagttacctgcccctctctgttatgattactgcgtttaagaagaccagcgttacaagacctcttgagggcttcggagttcttatcccttcgaatgagcaacataatggactgaagactctcggtaattgtctggttcacgtgtgtagcgaatcagattttcaaaccctgatttcgtaacattgcaggtactctgttttcatctatgatgtttccagatcgtgctttctccgatatgtatctctatactaccatggttggaggaagcagaaatagagaacttgcaaaagcttcaacgtatgagatatgcaatgttttaaatgtatgctatagtcatcgtttcaaccttttggtgcctttttcttactaatttatcctcctggtttaatgatcttagggatgaattggagcaaatagtttcgtctgatctccaccagctgttgggcactgagggaaaacctacttttgtgaagtattgatatctttcacccaacttaacatgatttgtgcttataatatgttaaataaagtaactgaaatcctgaaattaagactacgaaactgtatggtgacagtcatttttactggaacaatgcattccctttatatgggcacaattacgactcagttctgagagcaatagaaaagatggaaagagatcttcctggacttttttacgcaggtaatctgtcatttgcttgttgcgataaagttcatgtacagttggcatatcaatcaacttgcattctttcttgctaactccaaacaatcaggatcattaacttgtaggctgcagcaacagagagtatctcccaagttgttaggtttcatgtaacctcgtcgctgagatgaaatttccgttggctaaaaagtgaaagttttgtattgatgttacccaaaacaaaagtattttgcatgttgcttgaagttttggttgtttcagatagtacatcctttgacatgaaaataaatggaaaagcgtatgtcaagcaattatcatctagtttctttgtttctagatactagccgcatttgatcccagatcatttttgaggaagtcagctgaaataccgtagctatccttcagttttcataataaaactttaatggatctgatgtacagtaatttagtgtgcaccgggttaataattgatattaacttcatatagtgagtcttataaagatataatgaacttatatacaatatagtggattttattaatggaaaacatatagtgaaactatatgcaatatagtatgatacataaagacttagacaacaagagcattcgaaattacaaagaacaaaggaaagaacaattgtatcaaaccggttcgaatgaacaaacaaccaccacttccacaatcaatgtaccaccaatcaagactaaactataacaatgagcttctagtttaagtctactttgagttttaatcaccaattcaacgattagatgatcaaaattgcaaaggttaagagttggtcaaacctaaccaagagttacactaggcacatagctttgttaggagtatattagtttatgaattctagttaagttagaaatccaatacctagttggattaggattcctaattggattagaattatagtttagttagaattctagtaatagtaggcgtgtgattaggagatataattagcttaattcttatattgttagtttaattcttatcctcgttttaggtttatctttagtcgaacttgtaccctatataaggggcctttatttcattaataatatagtttattttgagtttaaacctttacttgtgattgtttgcttgagaggttattaatcgaaccattaataacttttcaggattgttaagtttttagtgttaaacatcttaatttcaggagtgattttaagagtgtttagattcttgtattcaagtttcaggactgatcttgaatcaagaaatatccctagtttcgactaatatcataagtagttcgaattcttggagtcttttcttcaagattcatattcataacttgattatttagacttcttggttttgtaatcatatcaagtggtatcagttttccagggaggagaggatacaaagggttctctttgatcaaagaagatccaagggcatcaataagaatgacacttgcaataagttcgagtgatacaaacaacttcaagactcgatcttttgctaccaagaaccaatcttgacgcctgaagattgttaggacaaaggataagaagtgtttctacatccaagattgcattctttacgtccaagattgcgtcaagatccattctttaagttcaagaaaggagtagaaagcattcgaacactacttaaacatgacatccgagatggataagctggctatggccatgagtgccttggcacaatcacaaactgagtcacgcaaccacatgggtaggatggaggcacgtgaccgtggattgaaactagatgactatagtggagatggcaatccagaagacttgttggagtggatttgccaactaggcaaagtgagtgattataggggctttgatcacaagaagagattcaaggttgcttccattaggctcacgaagtatgctggaatacggctcgaaggattgcatgcacaaacttcttgcctaatgactatgaacaaaaacagttcataaggctcgcatcaataagccaaaacacacttagtgtacacgaatacagcatggagtttgacaaattagggcttatatgtgacatagaagagaaagagcaatacaagattgcaatgtacattaaagggttgaatcgatatatagccaagaagatcgaagtctcaacttatcacttctttgaggatgtgactaaattggctaagaaattcgaagagcatgacaaagaagaagggcctaagagttcttacacacctaagtatgactctagtgctaaagggaaatcaacagttccctactcaaggtggtcggaaagacctaagaaccccactacacctaaggaggacactagcatggagaagacaaaagtggccgtacctaaggagagtttaattttgtgttttatacatctttgcttaagagcttaacaattgaaactattaataacttttcaggatggttaagtttttagtgttaaacatcttaatttcaggagtgattttaagagtatttagattcttgtattcaagtttcaggagtgatcttgaatcaagaaatatccccttgttcaactattataattgatcttattcgagttcttggagttaatttcttcaagattcatattcatacttgattattagacttcttggtttagtaatcatatcaatatcattagcattaatttacccccagggagattaagaaaggattagcctaatcaaggcgcttaagaagtttttaggaaaaatcgtgcttgttaagcttaagaattgaacttctttcaccatttgcccttgattctcttgttgaactagaagatcttggttcatagtagatgctcctgcatcatagtagagcatttaattttaattttttaacatgcacgaagatgtaggtagtgtagtatatatcgtgagacgtggtttaacatatagaaagatgtagtttctgcatgatatagtgagtttttgcatgatatagtgaatgtctgaatgatacagtggatcgttccgaattgttgtagtttgtatgatatagtatttttgtgaatgatatagtgagtttcttcatgatacaatgggtttctgaatgatatagtggattgcttagaaatgatatagtgagcttttgtatcatgtagtaggtttctatgtgatataggttgttaaaagatgatacatgcttttggcctcatgtactctaatgttaacgtgaacccggtccttgcaagtcaattgcagttttttcaatattaagctatttttttttttttttttttttttttttttttttttttgtacgggaatatttagcatctttaccacaaacataaccatacgaatattatgcggaaattccagtctgaagtcttaacttttcaaaattaaaagcttctatattatttttggaatgaaaaaaaatgagctatggcatgttattttgaaatacaatgagtctcaaggtgcatagtggcttcaattctacgaataatgaatggactactgatttctaattttttgttccgggcttttgcattaggtaaccataaagatggactctctgtgggaagaactatttcctctggatacaaagctgcggagcttgtgatatcctatctcaactctacttaagatgcctaaatgatcgaggagactccgtaagtcctttctctgattctatctttgaactgagtggaaacacgactgtggtctaaagtagttgatgtctcagatatccagaaatggcgttagtgatattcaggagctgtccattgaccctttgattcattgttgcagtttactgaaagttgttagctggtctcagaaaaacgaaaggaaaaaagggggaaaacaaaaacaaagaaacgtagattgtggtgttaaaatcaagaattccagagatttgtaccttctttatcagttgaattgtttacagtgtgaatcaagaagttagctcgaccttcttttcttgtgaatggtaagatttcgtgatcatcaatacttgattgtgctgtttgcaacttcaacggtaagatttcctgatcttacagtttaattgcttgtgctgtttgccactt

SEQ ID NO: 20 - DNA, 1575 bp, synthetic construct
  misc_feature 1..1575: note = R126M mutated Beta vulgaris PPO2
  source 1..1575: mol_type = other DNA
atggtaatgctatacgattctcacctctcaggagtctcaactcatcttcaactatcgcaggcatttcccaggaagaacccattaatggccaaagtgtctgagccgggtaaacccacttctgctaaaaggattgctgttgttggtgctggtgttagtggacttgctgccgcatataagctaaagtcccatggcttgagtgtgacattgtttgaagctgatactagagctggaggaaaactcaaaactgttgcaaaggatggtttgatttgggatgagggggcaaatactatgatagagagtgaagcggaggtcacgagtttactcgatgatcttgggcttcgtgagaagcagcagtttccaattgcacaaaacaaaatgtacattgcgagagacggtcgtcctgtgctgataccttcgagtcccattgcacttctcaagagcaatatcctttcagcgcaatctaagctacaacttatgttggagccattcctttggagaaaacgctatgcttctaagatttctgatgagcatgctcaggaaagtgtgggtgagttttttgagcgacattttgggaaagagtttgttgattatctaattgatccttttgtcgcgggtacaagtggaggagatcctcagtctctttctatgcgtcatgcatttccagaagtatggaatattgagaacaagtttggctcactaatttccggattaattcaatctaaactgtctccaaagaaggaaaagggtggaggaggaaagccttcttctaatgaaaagacacgcatacgtggttcgttttctttccagggtggaatgcagacacttgttgacacaatatgcaatcagtttggtaaagatgaactcaaactacagtgcaaggtcctttcattgtcctacagtcataaggggatcccttcttcagaaaattgggtcgtgtcttctgtgtcaaaaaattccattgaagatcaacaatatgatgctgtcatcgttaccgctccaatcagcaatattaaagaactgaagattctgaaagctggagttccattttcacttgacttcattccagaggtgagttacctgcccctctctgttatgattactgcgtttaagaagaccagcgttacaagacctcttgagggcttcggagttcttatcccttcgaatgagcaacataatggactgaagactctcggtactctgttttcatctatgatgtttccagatcgtgctttctccgatatgtatctctatactaccatggttggaggaagcagaaatagagaacttgcaaaagcttcaacggatgaattggagcaaatagtttcgtctgatctccaccagctgttgggcactgagggaaaacctacttttgtgaatcatttttactggaacaatgcattccctttatatgggcacaattacgactcagttctgagagcaatagaaaagatggaaagagatcttcctggacttttttacgcaggtaaccataaagatggactctctgtgggaagaactatttcctctggatacaaagctgcggagcttgtgatatcctatctcaactctacttaa

SEQ ID NO: 21 - protein, 524 aa, synthetic construct
  REGION 1..524: note = R126M mutant protein of Beta vulgaris PPO2
MVMLYDSHLSGVSTHLQLSQAFPRKNPLMAKVSEPGKPTSAKRIAVVGAGVSGLAAAYKLKSHGLSVTLFEADTRAGGKLKTVAKDGLIWDEGANTMIESEAEVTSLLDDLGLREKQQFPIAQNKMYIARDGRPVLIPSSPIALLKSNILSAQSKLQLMLEPFLWRKRYASKISDEHAQESVGEFFERHFGKEFVDYLIDPFVAGTSGGDPQSLSMRHAFPEVWNIENKFGSLISGLIQSKLSPKKEKGGGGKPSSNEKTRIRGSFSFQGGMQTLVDTICNQFGKDELKLQCKVLSLSYSHKGIPSSENWVVSSVSKNSIEDQQYDAVIVTAPISNIKELKILKAGVPFSLDFIPEVSYLPLSVMITAFKKTSVTRPLEGFGVLIPSNEQHNGLKTLGTLFSSMMFPDRAFSDMYLYTTFVGGSRNRELAKASTDELEQIVSSDLHQLLGTEGKPTFVNHFYWNNAFPLYGHNYDSVLRAIEKMERDLPGLFYAGNHKDGLSVGRTISSGYKAAELVISYLNST

SEQ ID NO: 22 - DNA, 37009 bp, synthetic construct
  misc_feature 1..37009: note = F420V mutated Beta vulgaris PPO2
  variation 32531: note = n is any nucleotide
  source 1..37009: mol_type = other DNA
tattccatcgaatgtagcaaattgactgtccgttgcaatttcggagtttccactcgtcgcatggtaaatggtaatgctatacgattctcacctctcaggagtctcaactcatcttcaactatcgcaggcatttcccaggaagaacccattaatggccaaagtgtctgagccgggtaaacccagtaagtcaaacattcgaatcacaactcaagcaaatttgtcttgtttgcgttatattttgctcatttcagccttttttgtttttccgacctttgcatactgaatattgtgtgtgtgtgtgtgtggggtttcagcttctgctaaaaggattgctgttgttggtgctggtgttaggtaaattttcgtctcttgcagagtttttgagtcatttgggaattctatgtgaaacttgtaactcccttcagtccaacgaacgcagtacaattttctatcaaatcatggtcctaatttccaattttccatatatattgttggaattatattgggattgtctatcactattaatagtattaggatcaattgtagagaagcacagaaatttttgggatcgaaagaatatctggattgccacattaacagcagatataattcttccaattggtttttggttcttcctaccttgacttgtctggtcaaacattataaactttaacctttaatatccattaaagtaaactataggatttttttgtctaaaacatgcttatataacatgaaatttgtgagaaaccaccttatatatatttttttgcgaaaacaaaccttaaacaaaattattatcgtgagaacaaaccttatgccaatttcgatcattgacccaaggttttggcattgaccgtgtcatgaattttgttgggtttaaaaagtcatgtgtcttgcatacgaaatggtaaatgcgggaaccttgggtcaatgtttggaatccgcataaggtttgttctcccaaaaaatgtttttgttcaaggtttgtttttgcaaaaaaacttatataaggtgctttctcagaaatttcatgttttataaagtagtatttgacaaaaaaccctaaaatatattatagaattattattgactaaattgtgtaaaaatgtactcttctaaaagtacattatagtattttagtggaacatttgcgagaaactactttataaatacgatttttgcgagaaatttcctaataaaaaaatgtgaagtgcaaaactatcttattgataattttctactccctcaaatccaaaatactatgaagtctttcctttctggtttgtcccagattagtttgtacgcttccatctttggtatgatcccacttttattatacttattagttttacgtgagttccttactctatctcttttaacaaaaatactcaactatctctatccaataaaaagttccttactagtcctatcacatctgctttttaataaaataacgtttgataaccacacaacttatatccttaaaatacacgttcaaccaagtgttgagattaatttggacggagggaataaatattttttgaggcatattggtagcagtattcggattccgataggttgactatgtttccaatgttgaccaacacttgccttgcatgtaattctaactttgctcttttttattcttcatttccctcgtattccatatacaatgtttagagacccattccttcctcttctcttctttcccttccttactatgctttgccataatcttcctcaaatgagtgcaaattaatttgtcgttgatgtaggccaactgattgtagcacatcttcatagttcatacctcaacacactcgtaattatattataccctacatgttaaatggctcatgaagctttattttatatcatacttcctccgtttcacaataagtgtaacacttttcttatttggaataatcacaataagtgaaaccaagctccaaatggtaagaaaagttcactcttattacaaatataccaccaaaaagtaagaggggatcacaacttcaatacttcttcactctactttattgtggtcccaactttctctctctaaattccttggtaactccccactttctctatgtttcacttatggtgaaatggaggaagtattttgtagtggtatttagctactaggccttggatgatatacaatcatacaatgtatttatattcacgataatttgctgcccaccttgattaccatgatttccaccaattttatcaatttcagtacttcaccaccccgaatttatattttttatttccaaccttggtatctccatttgtctgagtgcccgatccatttgtatcgcctccagaattgaagaagcttcctgcagctagacaattaggaaggttaaaaaagtttggagatggtggaggatagccataataatcattgttgggaggtggaacttggaaggttattgtagggttgaagtccttgatgaagaagaattgagttcaaatgagaggaaaaaggagcagggaagagggacaataagaaaaaaaagggtaaactaaaatcacgtgtaaggcatgtgcagatcaacatcagaaagcatagtcaacctactggtattagggcactgatacctttttgggtcaaaatttttttacaaggtatttcatgaggtagttttgtccatttttttttttacaaggtatcgtctcattttttttttatcatttagtttctcgcaataagtgtatttcatgaggtagttttttccaaaatttcctcatttattataaaatacctcatcttttccataaataatgcaatgtctagacttttacgctgtttacacatgctcctttgaccatctattgacacacaaggaaaaatagagtagagtcatgcaggatcttgttagatttttctcgatatatactttcaaaagatcaatttttttataattttttttttgaggggattttttttttataattatgtacttatcaaaggtcaaagttgtgcaccgggaagcataaaactctatgtgttgcaatttacatggaaggggaggagtataataagagaaaattatggtaaaaggttcattcctggagatcatgagaaaggaagtagaaagaacaaaaaagaacaatgggagtgcttttcaatgtttgttgtacgtagcatttattcatttgctataatgttttgtgacattgtagtggacttgctgccgcatataagctaaagtcccatggcttgagtgtgacattgtttgaagctgatactagagctggaggaaaactcaaaactgttgcaaaggatggtttgatttgggatgagggggcaaatactatggtaatgtttttgattattgcaggtcttgcactttagcgcacaattaatttctggatttttttttgtactgtggtggttatggtcatcaacatgtctcacccactgtgcttgcagatagagagtgaagcggaggtcacgagtttactcgatgatcttgggcttcgtgagaagcagcagtttgtaagtctttcattatctgaatggcacatactttatttcgaaagattgtaattgccttttctttctagatggcttcatcttcatgttgctttctgattcagtttcgtggctaactttccaagtttgtctgattgctaactctgtcatagccaattgcacaaaacaaaagatacattgcgagagacggtcgtcctgtgctggtaagtttgcttgttttacttttgacctcttttaagatctttcaactctggagcctggaaacatggtgatgcaggaggcaagttctctctattttacatcctttcttctctgtatcttatgacatttgcctcttattctgtgcagataccttcgagtcccattgcacttctcaagagcaatatcctttcagcgcaatctaaggtcgttttatgttaagacatacttgatgctgagagtttattgaattcttaaccttcttcttattttttttttatttttttagcaaaaggtaagtatattgcatttaccaaaaaacagtatgtacaccaccacagcagccatgtcagaatctagaaataccaccgaaaaaatcctacacccaaccagagacagttatattatatcctactcctaagtttctgtacccaatttacatcaatattggtccatttacaagatatttttataattcacagaagcacatcagttttaattagtttaataatgacctctggatgaataaccaactcagaccatatagccttattcctggctttccggaagttgtacgccagagcagcaagcacagcaatgcaaacctgtttcttatacctccttttatgtgtcttagcccatctcttatagctagtgaagatacagtcgtgtgcacaggattgaaccccaatccaactagcgaaagcctcacaacattatgactataaatacatctgaagtataaatgctgcacctttttctcctcttgcctgcacggtatcagaacaaatcccagctttagctaacaattccctggttttcagtttattcaatgccatcatgcaagcaatgaaagaatgttttggaacattcagtttgttccaaacacagtgagagcaagggacctttcctgcagttccacttagccacttatatccctgactaatagtatgactctttgcaccgtaaattgatttcaacttaactttttcataagcagtgaattgtgtgttgttagagtgtctagctgtctaggagattgggagaaaaggagggaccaaggagatagaaacacacctttgtgtttctttgtgtatttactttttagggtgggtcacgttttctgagaaatttgggaaaaggaagaaatagtaacacactttcccatttgtataacctgtatactggagctccaatataatttgcatttttttttgagctgcaagaatatgttgacaaacagttattgcttcttcctcagctacaacttatgttggagccattcctttggagaaaacgctatgcttctaagatttctgatgagcatgctcaggaaaggtaatgtcaagacatgtgttacctcgccttaattttcgttccaggaggtgagcatgcatttagaactaaaaggcacaaagactgttggtggtcttgcctgttcaaatataatggagaggagttttcgctacatttaccctctcttgaagtggggttgaaatatagcatcaagttgaatgcttgattaagtttaaaggacttgtgtaactctttttctgtttactgtgattacatgacctggttgattaacataatggtctgtttatctgtagtgtgggtgagttttttgagcgacattttgggaaagaggtaatggtttaccatagtatttctgctttagtggtaaattgtaatgttgctgataattatacttcgctgcagtttgttgattatctaattgatccttttgtcgcgggtacaagtggaggagatcctcagtctctttctgtaagtgaacattttgtgcttcactcccaattttttggaggctggaaatagattcttttccagttgttctgtcaaaaatagatgtagctttattttgaatttgaagttcccaattgttcattttgactattactgattattgctaagagtggcattatgctattatgctcctaaaagaaaggtgaattttgacctacatatagtataatgtatcaatattggtttaattgtttgttcttttgttccttttggtgctcatcttgcgccttgttctcatcgctcgttttttcatgttgcacttgatttaaatttgctcagcttaacttgtctttttgaatttatattacttattgctatattttactaatttcgttgaaactaattttttgctgaacttttcgttttgttgaaatcatttttctgaattaacttgattttcctgaatagaattgaattttggtgatcttaccttttctgcagccttttatttctttcttgtcctttttccaatctcatttttttatatttccattgtgttgacatcttatcattaactgtgcagatgcgtcatgcatttccagaagtatggaatattgagaacaagtatggaccataagacgtttattttaatcgacatgtatgtttcttagtttatacatatattaattctgtggtaaaaaaaccgaacaagaatatctttttttttttctatcatcaaaaagggtgaatatatgtagaggaaaaagatttgaatcaagatattagcctaaagcaataataatgttagtaatagctttaataacaaattcaaaacgtacattaatgaaccgagaggccggaaaatagttaaagtgaccactaagagaagcgaaggattcatgatgggttttcaacccagtagggcaaatttgttcaatgttctttacaaatcaagcttattaccttgtgggtgtttttgctagagatgaatgatagaattttccctagttggaagtcttttttggttactttatgggagctagtgatgtaatttgtttcgccttatggcatttcctaacatgtgcttttgtgatgtattgaagctttttttttgccttaatttatgctggattttaattttgttctttgtttcatttttcttgcttttgaaaaaaatatatagatatgtatatattaggattggtcgaggattttgagggaagggaaagacctaagaaaacttggatgagggtgattgatagtgatatgagtctatttgggatcgaagaaaatattcctttggataaggtgtagtggagggttgagggagcaaatttatgcagattagcttgacttaaagtttttctttttgattatttttcatttacttgtgttttgcaaacatttactcatgaatgatgtaaacttcttcaaccaaatctctggaaaaaaataatctacatggaaaaaacattattaatgttaacttgacagagatcccatccttgtgaagcagctagcaattaggcatctaacaattgacattttaatggacaggatagaatgtctcttgatagtcaataccctctgtttcattgtatcccatagctactaatctagtttgtatctttccaaagaaccattattttgaagtttcaccttgaacacccattttgaaccaatatgtttcttgcccttggggagaggggctaattgccatgttttgatgcggatgcaaagacacttgttctacctgagcctattgacttgatcatggatactctagggtttgaactcaagggaaagaatcaagtcttggcatgtgtggtgacatggcgtggggatggagtaaagaagagtcatagttctgttaggatatgttcttgcttgctacatagaatcgtagttctgttaggattgctatgatattatatctagtagatagattttatagttaattaggataaacatgtgatgatcatgttataataggcatgtgattagaggataggattagcttaattcttatcttgttgttagtttaattcttatcctagttttatgtttatcttagtcgaagttgtagccatataaagggcgttccattcattaataatacttagttttgctttgtgttttaaacatacttcttgattattgtttgcttgtgagctaactaatcaaaccattaaagacttttcaggagttttagtgctaaacatcttaatttcaggagtgattttaagagcgtttagtgatcttgaatcaagaaatatccttgttcttgttcgactaatatcagtggttttgttcgagttcttggagttaatctcttcaagattcttattcaacttgattgttgagcttattggtttagtaatcatatcaagtggtatcagttttccagggaggagaggatagataggattctctttgatcaacaaagatccaagggctatcaacaaggttcaaacattgctgcttgttcaagacttgatctttttctaccaagatgcattctttacgtcacaaggtagtaataacaagattaagagtggtttttacatccaagaatcaatctttcacgtccaagatttcatctttcacgtctaagattcattctttaagatcaagaaagttataacaagcatagaagaacacataaccatggagtccgagatggacaagcttgccaaagctatgcaagcacttgcaaagtcgcaaactgaatcacagagtcgactcaatgagaatactaccacaatcaatgggattggtagtaacatgaataggttggaggcacgcatggatgccattgcaaccatcatacaaaagaagcttgatcggaatagtgccaacttcataggtgccaattcagaggaagagttggcagaacgtgaagaaagatcatccaagactacatacaatgatgatcgtggcttaaagttggatgactataatggagatagcaatcgagaagacttgttacagtggattcgacaacttgagaaggtatgtgattatagaggctttgatgacaagaaaagattcaggattgcctccataagactcacgaaatatgctggaatttggcttgaaagcttcaaggcacaacgagccaagaaaggtaaagaaaagttgtgtagttggacaaagttgaaagttcaagcttaaagagaagttcttgcctagtgactatgaacaaaaatagttcataagactctctactataagccaagacacgcttagtgtacatgagtacaccatggaatttgacaagctagggcttatatttgacatagaggagaaagaacaatggaagattgcaagatacatcaaaggcttgaaccgccacattgccaagaaggtggaagtatccacttatcacacctttgaggatgtgacaaagttggctaagaagtttgaagaacatgagaaggaagagaagcctaagagttcttacacgcctaagtatgatactaatgctaaggccaaggctagcttcctactcaaagtggtatgaaggacctaagaggctaagaacctcaccccacctaaagaagacacaagagttgagaagcctaaagtcgtcgttccaaaggagaaatttgaagagatgagaaagtgcttcaagtgtcaaggaaggagacacatagcaagcaattgtcctaacaaaagagtcctcaccatgagacaatacctagctttgcaagaagaggaggatgtctattagttcgtccctgatgaagagcaaacttaggggaagaagaggaggaggatgcttttgctgaggatgatgcaaggctagtaggggtcaagaggcgcaccttacatgtcgaccatacacctagcatggagcaaatggaaaaatcttttccacactagatgcaaggtaggtgactatatatgtaatggtataatagatagtggttcttgcactaatgttattgtatctgaggtagtgtcaaagctaaacttagctacaagggcacaccctaagccatacaagttgagtttgctagatgatagcactggcatgagagtaaagaaacaagctttgatttcattctctataggggttataaggatgagttatggggtgatgtattgcctatgagtgcatgtcatctcttgcttggaagaccattgcagtttgataaaaaggtcatccatgagggggactctaatgtgtactctgtgttggttggttctaagagggtatgtttgcatcccttagctcctcattcagtggcgccaaagcaaccacctaagacaccaagttactttctatcttcaagggagttcgaacaagaggtggaggaagaaggttgtgcttatgccttgattgtaagacatgctgccacaagtgtcaagactactagcaatgagaagctcgaagccttgatgaaagagtttgaggatgtctttctagaggaactacgacccttgagaggcatagaacatgctgtagaccttgtacctggcgcccctttgcctaacaagcctgcttataagtgtgatccagtggcatctagggaattgcaacgccaaattgaggacctaattgaaaagggctatttaagggagatcatgagtccatgtgttgtgccagctttactagttcctaagaaagatgacacatggaggatgtgcatagatagtagagcagtgaacaacattacagtcaagtaaaggtttcctatgcctagattggaagatatgttggataagttacatggggcatcaatcttttctaagattgatcttcgaagtggctaccaccaaatgaggatcagagaaggtgatgagtggaaaacaacattcaagaccaagcagggattgtatgagtggatggtgatgccatttgccttatgcaatgcgccaagctctttcatgagcttgatgaatgaggtacttcgtccgttccttaacaagtttgtggttgtttacatagatgatatacatatctatagccaaaatgtggaggaacacttgttgaacttgcgtagcttattcatgaagcttagagagcaccaactctatggtaagattgatggcgacgaggttgacgggggattatggcggcagtgaatcaccctctttgccggtcactgaaatacaacctgaggtatctttaaattctgtaattggattgactaacccaaaaactatgaaattgctgggaaaaattgctggatgtgaagttgtggtgatgattgaccctggggcaacccataattttttatcactagctactgttgagaaattagctattcctgtgtcggaatcggaaggatttggggtttctctaggggatggacaggcggtgaggggtagtggaatttgtagaggggtgttattgagtttaaatggtggagttgaagtggaaacagattttcagcctctgggtcttggtaattcggacgtgattttgggtgtacagtggctggagacgttggggacagtggagagcaattggaaaacacaaacaatggggtttgaaatcgagggtgtcaagttcactttgaaggtgacccatcactggcgaggtctcgaatctcactcaaagccatgatacgtaccttatgtaaagagggtggaggtttgtggcttgagttgaaccagattgagcattatcaggagaaaacaccgcattcatcagccttacctgaaattccagttttcttacagagagtccttacccaatttcagtctgtgtttgctacaccagaaggcttaccaccgataagagaacatgaacatgcaatagttcttagagaagggtgtaatccggtaggggtaataccgtaccgttatccacagttccaaaaagatgagatagagcgcctcatcaaagaaatgttggcttccggaatcatcaatccttccacgagccctttctcgagcccggtgatattagtgaagaagaaagatgggtcgtggcggttttgtgtagactatcgggccctcaataaagaaacggtccccgataagtatcccattcccgtgattgatgaattgttggatgagcttcatggggcaacacttttttcaaaactcgacttaagggccgggtatcaccagatccgggttaaggccgaagacactctcaaaacagcttttcgcactcatgaggggcattacgagtttttagtaatgccatttgggttgacaaacgcgccggcaacgtttcaatcccttatgaacgaggtcttcaaaccattcttgcgcaagtttgtcttggtatttttcgacgatatattggtctacagtagttctgccaggaacatgaggagcatttgaccttggtgttgcacaccctagcagctcataaattgtttgtgaatcagaagaaatgtgattttggcaggtcggaagtagcatatatggggcatatcatctctggtcaaggggtggctgtggatatggagaaggttcaagcgatggtggaatggccccttcctaaaaacctccgggaattacggggatttttgggccttacagggtactaccgcaaattcgtacttcactatgctcatatagccaagcctttaactgatcaactcaagagagatgcgtttgggtggtctgaggcagcaactcaagcctttgaaaagctcaagaaggcgatgatcacatcccctgttttggcaatgccggacttccaagagttgtttgtggttgagaccgacgcatccgggtatggtctgggggcagtgttaatgcaaaacaaccgacccattgccttttacagtaagttgttaggtgcccgggctcaattaaagtcgatctacgaaatggagttgatggccatctgcatggcagttcagaattggagatattatctgctgggtcgacatttcctcattcgtacagaccaacagagtttacgtcatctcactcagcagcgagaagtaagtactgccttccaacgttggatgagtaaacttatggggttcgattttgaaatacagtttaagccggggtgtgccaaccgggtagctgatgcattatcccgcaagacagtgggagaggttgaattgggtgcgctgatattaactcatggggtggactggaccgacttggagcgtgaaattgaaggcgatcctctgttgtgcaaaattaaacaagacttccacgggggtgctattactcctgtgcacttttctttggtggacaacaagctgttgttcaagggtcgatacgtgattcccagctcttcggtttttattcctaccttgctgcgagaatatcacgattctcccattggagggcattcgggggacctcaaaacatatctcaggatggctgccgactggtattggaggggcatgcgcaaggatgtggcgcggtatgtgcaacattgtagcgtgtgtcaacaacaaaaaatgtctcaacagatgccagggggggtactacaaccactccccataccttcctcggtttgggatgacttgtcaatggacttcgtggaaggcttgccatcttccaagggggtaaacaccatcctcgtggtggtcgatcgtttgtctaagtacgcccacttcctcccactacgtcatccatttactgctgtgtcggtggcaaatgtgtttgtcaaagaggtggttcgtttgcatgggtttccttcctccattgtttcagatcgggatcgaatttttatgagtgtgttttggcgggaattatttcgtttacatgacaccacactcaaacgaagtaccgcgtatcatcctcaaacggatggtcagtccgaaatcgtcaatcgagctctggagacttatttgcgttgctttgtgggggaatacccgcgctcttgggctcagtggcttgggccgaattttcatataatacttctcctcatctctctaccaaaatgaccccgtcaaggtcctttatggtagagaccctcctactgtgatacgggttaatcggggagcctcacctgttgaaagcttggaaaacatgctccaagagcgagacgcagtattagatgccttgcagattaatctgattaaagctcaacagaaaatgaagagtagtgctgatgctacaagaagagaggtgcattttaaggtgggagatcgagtgtacttaaaattacagccttaccgtcagaaatctttggcttaacgcccttatgagaagttagccgcccgtttctacggaccatttactattttacagaagattgggcaagctgcatacaagttacaacttcctgtttctagcaaggtgcatccggtgtttcatgtctcccaactgaaacaggccgttggttccattcccgtttcagccactattccagagcaattgtcttctgacttggagttagaggtggaacctgatgaactcctcgatgttcgtagtgtttctagaggccagcacacttacttggaagctctcattcagtggcagggattaccatcattcgaagctacctgggaagatgtggctgctttccatcaccattttccatccttccaccttgaggacaaggtgaaactttgggggggtggtaatgtgatgcaccaaactaccactccactactcacctattagaggcgtaagaaaaagggggtaaatcaggaatagtttacaaattctgttgaaaggaatattttgtaattatgatgtcagaggttgttagcaaaaaggcagtagagtaacaataaaaaggggaagggaggagagaagaaggtattgagatttttgtaaggaacttggcccttgggagagttgggagcctctcgaaagctcaccattatcttgtgaatattttccttcctggttatatacaagaaccttcctctgtcaatttcttttctctctaatcttatttcttattctgttttctggttgccattgtttgaagttgcttgttgtgcttgagtaaatacgtgaagtggtgaaacccatctgaattcatcacatctattccaagtggtataatacaagcttgtaatccaaatctaatgagaaatctaagttatgaagaatttcaaaagaactaagtacccttgttttggatgcccaaggatttacttgccgctcaagttaatgctcaacgtgcaagatacaacctctttagtatcccaaggtagtttccataagaattaattgagctcaaatcaagaacaatatttttatgtattaatgtgaacacttcctgaattatattagatatatggtctgaaggttggaagaaagattagcttttaattttaagtttgagatagtttttagaatcgaggaaagattagctcttaacttgtaaactaaggattgctttataagtaaaacattagttatggaactcttaaaattggttttgaacatttctagttaaaaatcccatgtaattctcccaaactagcttaaaatctcacatttcacaagctaaggagagacaaatggcgttctcttgtgaaacaatctaaaattttcattaggctactgttttcaagtatttatatgttagaagtgccgcatataggtacataaaataagtttacaaacacaagtaggaataaggaaaactaaaagagaaacttcagccatacaaaaccggctgaaatcagctactactttctactttctagcttcaaaatctgattgcaagtctcctttaagccaatcaccaatgaaaacctttcctccacatgaagtgtgctcaaatcaagagaagaaacccatcattcgcctatagctacctgggtcagatgaagatacggcaaaaaaaacgctggaaatcagtgaaccaaaataagcaccaattggatgctttctgtccttgctacattttcttctcataggactacttcaagccatacatgaataagcagttagatccagctcctagcatccatttgatcgtacaaatgagctccaaaaagataagtaaaaccaagcagccaaaacctaattaatactaatgatgaattagttgaatagctaatgacgatgaagcaacactttagtaggaatagtgttaattatgatcaatgctacttaatcttctgattaatttttggaaaaatgtcatatctaccttctgtatacacttattcataactatatcgtattattattatttttaaataactaccttttaagtaccaaaacctaagaaatcaggcacttgatggattccatccaaagatccatttggcggggcccactaactgacttttgattttttgcctttcctcttttggttaatctcaatggttcatcaataacaactcaatcttctccccatttcatcaaatcatccctaaatcagaactttttcaaattcacccaaatgaggttatggaaacctctaccaagtttattcgaccacttttagtctagctcaaagttttacacttgcttcaaaaactaagatttattaactttagaaattaggtttttatttttattttttatttaactttgtaacaatcttaaataactcaggtgctttctagagtttggctttaattgtttttcccttggttatgtgaaagaagtatgactactttctccaagactaaagtagagagcaaaaaatgcaattctggaatttcttgcaaaagaaaaggaacgagttaatgataatgaaaaacaaagaaaatgatgagaagagaggagctgaatcaatcatgatcatgtattttaaagttttttttgctattgaagtgacttaagaagaggaaagaggatgagtgaagacaaacaaaagaaaggataaatagagggaaatcttgggcttagaaaggtgaaaaggtaagaagatgagttagtgggccccaacaaatgtatctttggatataatccgtcatgccactgtttggggcttgcttaagtccatacattacttcactaattttacaaaatttattttcttgaccaagaactgaaaaaaccttcagtggtgatctattaggttttggaagttaaaaggtagttatttaaatgtttttaatataaaaggtagttatttagatatttttaatataaaaggtagttatgtgaataaaagtgtatataaaatgtaattttttgacatttttgccttagtttttcttgctaattcaccttttcaacttgaccaagttgctatgaggagaaaacgagcaattattaagcaaatcgcaacactagcattaatccatggcccatgaaactctccataattagagattggattagcacttagtagaacttcttgctcctgctccaggtttccattacttctttatctaagtgcatcaaaaggttgttgggttatgaaaggtggtggttgtgtatagtcattgtcaaaatgttgttaatgcactctatttagaggatgagggattgaatagttttcacctcgtgacctttcattcctttttaaaaaaattgataatgtgtattggtcctatgactgtatgaatggtaataagctatctcatgagctgttactatcttcctcagagtctaggtagaagggtttgggctgataattttctactatgtgcaattagtttgttggatttggatatgctagttgatataggtcctttcccttgggccttctcttaatataggcctacagtgtgattgaagataaatcttctggagaatataagaacaatgagatggattggttagaggttgatttgttcttttggtgtaagactatttcgggttctctattggttatgttcagacgccagaatatgtgttggtgattgttttccatgaacatactttatccgcagagacatttttcttttttcttcctataagattatatttgtttcctctcttggtgctcatctcagtgtctctactttacgttaaactgttgacattacttgacaatgcgtatatttgtcgcatggtgctcttccctcactccacgtcgaccccatacatcaaaaaatgccattaaagaatattcgaactcacaaccttgtgttgaaagaatggaatccctaccaatgactcattaattcattttctctttaagaaataaatgatttcctcacaaacttttaggctttaagagcccaaaagataaaaacataaaataagatagacatcaacgtcaagattagccttaaatgcacaaagcacatgtcaaatgattgataactactcacgagttgcaactctttgggcgttgcctaatattaattggatctcttttaaaaattgttggtggttatggttggtggagaggaccatgtaacttttagctggtcacaactggtaatgattgtcacttttactgcccataaaaaaatttaaactgttgaatatgtttctggcagtggatctgacaaatcctttacaagttggcgtccattttgttttgccatgtgactcaattataatacgtgagttttattatccaccaggtttggctcactaatttccggattaattcaatctaaactgtctccaaagaaggaaaagggtggaggaggaaagccttcttctaatgaaaagacacgcatacgtggttcgttttctttccagggtggaatgcaggtattagcatgtagctttcattctgttaacatttgtggttcttccagacatacatccaatgctttttttttttcttgctataaccataaacattcttgtcatgaacattctttaatactgttgctgagcttagtgtattcgttcattcatgtaatttcctctcttgaggttaaaatggcatacagccttacaacctatatccataatgctccttagagtagaatccctaggttataacatagtaccacttatcaaaataaacatggcacacactgcaggacaagaagtaaatccacctagagaactgagcacctagtagtaaaagcagcgatacattactaataacagtagcagggccataagagtagtaaatgggcctcatttcaacactccccccgtaatggtgagagagaagaagcagtctgaactcccagcttggagagcaaaatagagtgttgctgaacagggagaaccttagtgaaaacatctggcacttgatcttgagatggaacataggtaggctgaataaccccttcttcatttgtattgtccctcaggaaatgacaatctatgtctacatgcttggttttctcatgatgaactagatatgctgctatggcaagagcagcttggttatcacagtagataggagtagcactggactttttaatgcgaagatctttgaggagttgtttgatccacatcacctcacacacagcaagagccatggatctgtactctgcactgaccacaagaaattgcctctttgactttcaagatacggggggagtcaccaaggagcacacaaaaccagatgtagaatttacaacacccatcccattcactatcacaaaatgctgttagttgagcactagacttgttcgccatgagaattcaccctgttggcagcttgaagatgcacattagtggggcagtgcataaatttgcttaaatcatgtatagtgaaggcaatatcaggcattgccttgtaatagtgagataaatgagcttccccatcaatttttgatacacatcaggttgttgaagaggatcaccattgtcagcatagagcttgacatgtgagtccatacgaagcctcaatcgtctgcaatttataaaaccatattcatcaacaagacccatcacatacttctttagagataaaaacgatacttcactacactgatccacttcaatcctcaaaaaatatcttaggccacccatatctttcatgtgaaattggccagcgaagaaactctttgcttcctcaatagttgctaaactattgccagcaagaatgaggtcgtccacatacaccaatatagcactgaaacagtgagagttttgcttgaagaatagagagtagtcacacttggattaagtgaatacattttgctttaaagcagtgttagcttggcaaaccattgcctcaaagcctacttcaagccataaagtgacttaagcagcttgcacaccttagttcatttggtgtcacttctgccatcagtacttagctccccctctccttgaactttgatcctgttacatgtttcactatatcctggtgatagcttcatgtatacactatcctacaattcaccatgcaaaaaagcatttttaacatccatttgtttgcaagaaccaaccctctaaggatgcaacaacaagcatgtggtcatctttgctacaggggtaaaagtctgctcataatctattccatatctctgtctgtcacccatgattacaagccttggcttatgcctattatttgtgccatcagtgctgtattttgttctgatccatccatgtgagggatggctcatttctacaaaatcctagttccgttaggatttgtgttgttttcctaattctagtaggaataggactcctaaaatcctaatcctcctagttctgttaggagtttaaaagttttagtttgattgtaattctagttgtgttagaaatccaaatcctagattcatgtcacgtatggttagaacatggctagtaggataatttgtcttgtgatgtccatagccttggcatttgtggcacctaactttcaatagcttgtcttctgtctccttttctttctccttctttgaggaatcaacgtttttagagctatctaaaccactagcatcaatattaggtttaaaagtgctaaaagatttcgaatagttcttacttgcatacaatttctttttctagtttatgtagcgtcaccagggaacaaaaactcggccgttccgttctggaacggccgctttgtaacggatttcagagaggccgttccgttaaataccgttctagaacggtgatttggaattcacaccaaactcggcgcgatagcgttacgtaacggtgtaacggcgttccagaaccgttacaatcacataacgtccgttatttgaagaagaccagttcttttggtggaggaagaagaagagccaacgcaagatctatagatctgagttaaaatttgaaaataaaacatgtttttttatttaaattaaagcttacagaggatgtagaactcaaattcgagtaaacccctcctttaatttcattaggttactgcaaatcgaaccctaaattgcaaaccctaatttcgaaaaaaccctaatatgcattgggatgcaacgctgcttctccggtcatggcagagaaggtcgacgagtcatcttcggctgcttttagcactgtagctgccggtggttggcttgtttgcaggttagtgcttgctggttttctttctctcataccgatcatcttcttcttttctctcttctctttttcttttttattgtgtgactgccagtcacgtgataattgcaactcataaagtatctctttctctctcttcttttcatccctttttatttttctttcccttttagtttttattccctcacgtggaatcacctaattttcatccttttttatttttttagttacactcttacacagaagtatgttcaaatatcattatagtacctcaaatattgtatttataagagttttggacataatatgatatagaaagtaaaatagaagaaaaataaagtttaaatgtcacttgtgtgatttttttaaaaaaattcacgccgcgacggccgcgaaacgttctatttcccgttacaagccgttcccgcgataacgcgaccgttcccgcgaacgcgaccgcgaccgcgttttttttccttgagcgtcacatcttgcaagcttcttcaaaggtgagttatgtgtacaactccaatttctctccaatcccctccgtcctcatttaggcctccaaggaagctacttaaacattgatcttcaagttcatcaattttccaaagaatggataacttctcgaactcctttatgtaatcttcaacggacatattcccttgtttaagagtagaccattccatgtacaagctttgtttgtagttagaaggaacaaaacgtcctcttaacaactttttaagcttatcccaagtagagattttgggtttattagctttcacacgctgcctctttactccatccaaccaaatagatgcatatttggttaccttaagcacggccaccttgtatttcttttcttttggtgtctcttaatcccaagtagagcttttgcgtgtgaaagctaataaacacaaaatctctacttgggataatcttcttcttgtttccgaaacaactaattcttatggtagttaggaaagcaagaatggtttctaattcaatagggaatatattaattattattagtttaagttaaatagtgcacgaatctaaatagattattcgtctcaaaatctcacttaagtatagatttgtttggacatctgagggaagaagaagagagcgagataaaggagaattatcactcaatgaatccatatcccgagttttcccatttacttctttgaaagcaatatagttcacgaggtcttattatcagtctatggacataagagtaataatttaagggcaaaaactatgactttatgggtttaaactgatacatgttctgttaaactgatagatgttctgtgttaaaccgatactcatatattcctggttaaactgatagatatatgatttaaattgatacccgtctcagtcatgtcttggattgagacggtctgacacaagactttttgtgtattatatatctgattagaataaatttatcctgtttactaattattttatcttctccagacacttgttgacacaatatgcaatcagtttggtaaagatgaactcaaactacagtgcaaggtcctttcattgtcctacagtcataaggggatcccttcttcagaaaattgggtcgtgtcttctgtgtcaaaaaattccattgaagatcaacaatatgatgctgtcatcgttaccgtgagttttactttgcttactgctattgcaccaatctttcttcttttgacacactgataatggcaatgctgttgtggtttgaagccatgttatggggttttagggatatttatggagtctgatctaatatgttattggataaaattcagatctgtaacgtgactcaatgagattgaaaaaaattgaatcaagataatggattggaaaattaggagctaacctagggtctataagcgatccacttggagtctcataccaagcaggtattcgacattttaggtttatattgctgctatggctcatatgggagcctacatagggtctggtgcttattcctttttcttttgtctagttttggggctgcacatttctgttgtgttttgatatggatagccatcacctgcaattgcatggaggctgaactaagttctataggggagcaaacagtatctgttggaaatttattttcatattgtgtttttaaatgctataatccaaaatttgttgttcccctaaaatgcctaaaatacccttatgtaactgctccatctgtcccttaatagacttcccatttctccaatgcatgtttgccaatacacattttgtattgttaatatcaaaaattacatattagtaaaaattataaaagtttgattttcctaatgtacgcaatgagacgaatcaaacaagacgccatatgactatgttttttcttatacttcctatgttttttaataagtgacatgttttccttttagggaaatgtcacaataagtgacacatagctcaaagtagtaaaaatacttctcatttattacatctttgccattatttaattgtttcacctacctactttatccaatactcaaatttgattggttgaacaattggtcccaactttctctagactccttggtattccctttcccccactttctctctgtgtcacttattaaaaaatggaggacgtatattggaaaaaaattggaaggttttcttcacttatgaatagtggtaaaattagagatgggaaggctattttgggatggatggagtaatatttaaatttttaaaataatgtcattgttttagtgatgaaataaaattcaaggctattttttctagtaattatgttatctgtacatcaccacacgtatcgcgtgcatataagactagtttgatgatattccaacactgttcgaaggaagtcaggcatggaaccatgtttgcttccatatgggaaatattttgcttactctccttcaaacatctacctcattatcccagaatgattgatcgaatctaatacaaatatacaattgatcatatgccaccagggaattacatcaaattaaatttttatagaaggggaatcagtcatagcctcatagggaacgaataagtgatactcgccagtttctttcctggttacttttcctcttctcactagccatcctttatgtatgggtatgctgcatcattcctgccactggttgggactcccgtttgaactatggggggatgggaaagctaagccatcatcttcaaattgagtttcttgagaatgtaagacaccatctgtaagatgaatatagtgcactctatagtcaatgtcatgatctttatgggtttatctgctgaaataactgtgatatacccagctctccatttacaaagttttcctacatattaaactcttgcccgcaattctagaacttcattgtagaacttttcctacataagcatcatttgtcttttctgtagtaaaagttagaaagagctttattttagaacattcgtttttagttttctttgttgttgattactccgccacttttaatacttttatgattcaagtatttgacaaaatcatgtaatttaggtcctctgctgcatgcagtctataccctctctctctctctctctctctctctctctgtggttgtgtcttacttgttgagttactaactccagccattacataaagtaggctggcattatgatgagcaaattactcaagaccacatgttagctcctttttcttttctccttattctgaaaggcaaatataggtccatcttggtgcttctcatgtcataagtaagctgaccccctccttttccagggaataggacaataatccaaaagtgagggttttacatgttgggatttgtgaagtttcttattttacttaatagccgagtcagtgttacaatacatagtaccgtgttacaaaatagtatgtaacaccaagcatgtttatgtgcaaaattgtgcaagactttgttgctggcacgccaagggctgttttaatgtagtttacttattcttttaggtttttcagatgacaatcataaagggaattaggagtgtttttattgtagtcaatccctattgtgctacaacgataaaagaaaaaagcacaagactagaaggagaagtaatgtctaggaaagactcctcacctggggttgctagtcacctacacatcttagaaggcatcaaaccaaagcttattcccctcgactgttttcgggagaaaagaagacaaaattgtttctaacttatactttaccagtttcactacagcatcagaaagaagcaaaatatgctcccacaacacggcgaacctagctttccagatgtgataaaccagaccagcaaaatgattattttcactagagctttgagtctattttttcggtttttccccttcttcctggtaatgtcacgccaccaagccatcatctcaattttttgagatttgacgtaatcgctcaaatagctgagtaagacacttcttgctctaaatactaataaaaaagaggtgaatgtgggtctcagccatgttactcaaatcggataaagtgtctactcttattagggtttttgggtgttggactcatccatttttttttgtaaaatgtcaagattttggtttgaaatgagagattcaagtgtcgtgacatgagtcggcacgcaacacttaaacgtgtcgaagtaacagagggtctcagacaatcaactttaatcaatcacgaaccccaaaatttatgcaacctttgctcatattcagtctctgtaaagcactcaactgcagcacacccacccattcgcttcacctacagcaggagggcacccaagtaattgctatgatgagcgaattattctgttttgccttgctggaatattgctgttagatttgctgactcactggcagttaattatagtcagagaatgagaaatatcctgtagagagagaaagggtatcttttgtatttagctctataaatagctaaggaagggaagggcattgagagtttatgatattataataggagagatttagcctctcgaatgctgataggagcgtagctcttgttggattatcaatactactctgtttgctctatctatttctactcaggttccttcttgtacagtggatccctgattggatttacttcatcaaccagcagataaaattatttgtaggcacattgaaaccattccaaacctaatgaggccaaagtttatcacaaagaatataggagccaaatgtaggcaacagataagagtataattgccagaagttgaagactccaggtattgttcagaaaccttaatgcatatcatcattctgacactagattttccccggagccaactaacaaaaatgaattaaagagattaaggctatgtttagttcacctgaaattttctgatctgaacttatctgatctgatctgaacttattttttctgatctgatctgatctgatctgaaccaatctgattacaagatcttatcttttagatttttctcaatatataagaaaaaatatagtcatgtggggtcttgtttgattcgtctcaatgagtactttattaatattcaattattataatttttactaatatgtaatgaaagatataatgatttttaaatataagcatgatctgaactgatctgatgtgaacttattttttctgatctgatctgatctgattagatctgaaataagcaaaaataaggtgaactgaacatagcctaagcaacaattgagggaaaataagatcattatggctaagataagataaatatgtaatgataaaatcagagtaattatatcagttacactctcaacattcgtcagattgaggtttcctcccaaaatgccaacccacttttctgtattttcacgtccttctctctacccttctaggtatatattacatcagctgtaaaatttttgaaccaactagtagaatactgatctaccctcaactgcctcactttctcattttttctgggcctttttctctctagcacaagtccacataagtgatgcatagcagaaatataattccactagtcatcctcaatattgatataacaaacacatcacccacatattatcatttttaatcgctgcatgcgaggcatacttacccaccaatcaggatatgcataacagcgttcctaattccaaaaccaccatatatcttgggtttgcaactctcatccctagcaacaaggggactttctgaaaaagtggcagattccgcccacaagtagtttgtacggacacctttattatattattaatatcatatttcggcaacacaaattaccagcccagtaaaacatgaattgacatgagactaacaaggggcccaatctaatatcgtacgtctgtactaagcaatgtataaaaaaaagctcaaggtgcattgatgcaatagggatcctaatgtgcataggtgcgcctcattgaagtgaggcaccactaaggataaataaaaaagattgatgtaaaattaaattgtgcaccttgggtgcgcctcgatgaactttttttgtgtgcctaagtgtacctcaagtacgcctcattgatatcgcctcgcctggcagaaaacgagcttgaccccaatcgccttgctccccaccgcctaggcgtgcctcagtcacactttttaaatacattggtattaagtactcagaatggcaaaaagaaactttgggcattaattagacatttcactttttgtgcaactatttgtgacttcagagattgatatgttttctacattacagacttttgtgatggctgcatggtctccactgtcaaagaacattagtttaagtagaagaaatattgctctattaccttcctccctctacaaacaaaatcctaaaatgtggttatgtagtgccaattcaaacttgtagatgcatgactaatgctttcattatgctgtgggtttttatactatgattcatgtccaattacataacaattagctggagtcaggatatgtcacggaaattttaagcctggcaggatgattgtttatattttctctttttcggtgtttaagtcaaagtaaacttctaggctgctcttttataggctagttgggctgttggggagatctacacattaagtgtgaagaaatcttgtctaactccagtttggttgagaactgtaagctgtcataacatttgttgcatgatgaggccttgtgggattatcatgttagctgtaaactctaaacttacttgaaatctagtgttgtgtctccttatttctgtagtcaaaattgaaccttctgtacgtttttgatacctgcgactagaatgatggaattctgaattactgatactattacaaccatctgctaagaacgaagatgactcttagctaatttctcagcagatttagagaaattaagaagaattactaatgaatatttaaagagaaaactaccaagatatgattgtattgatgaaaaacaccaattacaacctaaccaacattcgagaggttggagctctcccaagtaaccatttctctcactaaacttatcaattttcaagatgccttttccattctcagttcctctatatttatactactccccttagcaaactacccaacttattccccaagtaaactaaagagataatatctaaaatacccttccccctacaataatattagttcttagcattaccggccccctaaacttccaccttgtcctcaaggtgggtcgtaatcatcactaaattctgggcctctactcgtatattcagtgtcttgcagcccttcaggccccaagcctaggttatgcagctcgtgttgcggctcctcctcatatagttctctggctggagtgagtgcctcaactataatgaaaaagtcctggaggtggggaaggaaggagtgtctgaaatggtgtggtgtgctgctggtgttatgggcttgtgcctgaaagttttgggtttaaagagatggagtggagaagagtggagaagtgactggagacgtaaaagaaggaatcataatttttgtaagtggtgggttgaaaaagttggtgggaagaattgtttttataaaatgtagtgtaatggtcgaaaaatgggtggagtaagtatggtttttggctggggatgtggtactgggttgaaaataaataggtctgagcttacttgtaaaattggcctcaacatgagcaggcccaatatcttgagccaattccccaaaagctggcaatagagcactcttaattgcattgttgtgggccatcgggctccaaacatatattcggaggagccggacttctttggtgatgtcattagcttggcccattgcacactttcccttaacagcctcaagatcttttcccacttttgtaccccaaccacgtggcttcaccatcctttctttcttgcttttgtcacttttttggcaatatacgagtttgtccttactaccctcatcttctaatgttggcttcctcaccaagcttaatttctggaattttgtccaccaaatcccaccacccatcgtcaacaccatacctatctacaccggccaagaagcctggtcctccacccgaattttcgccacagacaaagcctgaacaaccgtcagttctctcaccggagaagttcacaggtccaccacctgacccactagttgctgatccacccttcacaaatctccctcctctggctgccacaagtagtggttcctccgtaatactcatatttctcgtccaagagccctggaccaccaccggacccacttccaccggcaccaacttgttcaaatgatacttctctttcttttccaaacagcctacttggactggaaaaaccactgcgattgtagcctccgccagatctgtagcctagtgcacctaacgtgcttccaactgcaacccaatagggatggaaatggatgggattcggggagggtggagcatcacccgcatccgtcacccgcatccattcgctccacccgctccacccgcatccatccatccgtcacccacgggtgaaacgggtgggtcggtgataaacgggtggaaccatttagggggtgtttggtatcatgtttttttacaaaagaaacagaatcaagtaacaaaatccgtttctacttgtttggttctatgttgctcagactcgagtacccatgtccgacacgggtacgtgtccaagtgtccaactcagctattttctagaattttttatattttttaacccaaaacaaagtgtccaagtgtcccacccatgtccgactcccgaggatccgacacgggtacttgaggtgaaatgaagagtccgagcaacggaggtttggttagtgtgtaaagtaacaattaccgttacttgaggaaaacacatccccccaagttgtttccattcaaaaacctaaggaaacaaataacgtttcactcctcaaacaagaggaaagggaatgggttatatttatttccattccattaggataccaaacaactaataagggtaacacttattattatcctttcccctccttatcaaaatcctttccattccgtttacggtattcataccaaacacccccttagtatattttctaatgaaatttgtgatatgatatgcatgatataaaataattctatcaaaaatataaaaagtaagtaaacttacatgtacaacttaatagatgggtgatgggttggaggttaaacgagtgatggatcgggtgacgggtgaagaaattctcacccaccactcgctttccatccatttaaattaggtttttcatccatttaaaaaaccgggttaaacaggtgatgtatgatccatcacccatttccatcctcaaacacatcccgatttgtttactgcaccaccagatccaccagtataaccacccgaaaaatcatcatgccttctactagccttgtaacctgctcccggtgagaagcttcttccacaagtggtggtcgctggacctccatctccttcttccccaaaaaattttccatgacacccactcgacccttcatctgtgacaacctcttcttcgtccacctctgaagttttggggtcgtcttcctcctcaagctcctcttgaagtaactttaacttccgttggatgggagagaacgcttcattgattatcttcaccagatcttcttgaagtttctcgaaactttttctcacgttttcctctacctctttcgtgatttcctttccgatctccttcatttttagactaggagctcttgcgattccatggcagatttctttttttaaaacaagaaaatcaggcacttaatctcccagaatagtggtgctctgataccattttctaagaaccaagatgactcttagctaatttctcagcataacaacaaatttagagaaattaagaagaattactaatgaatatttaaagagaaaactactaagatatgattgtattgatgaaaaacaccgattacaacctaaccaagaggttggagctctcccaagtaaccatttctctcactaaacttatcaattttcaagatgccgtttactactccccttagcaaactacccaacttattccccaataaactaaagagataatatctaaaatacccttccccctacaatattagttcttagcaccatcaaactgggatggatggttttgtaaggttccaatttacttctccatcaaaatattttaggattttttatctcatgtattttagagtttcctcgtccctttttatctgataagattcttctgatgatttgattttatggtaggctccaatcagcaatattaaagaactgaagattctgaaagctggagttccattttcacttgacttcattccagaggtttgtatttttatagtggttagacatgcttcccctagttttcaaagtaaaagcatccttgttgtgacgatattttttcccttgtttttgtttttattattatcatcacttatttccattttctattttccatgctgataagatgttcatcaccataatcttgtggtatcagaagtgtttagtggagtttattcactacacatgcagttgttcttttgccatgaccgccattcattttctcgtcaaaacaaatctatgaagtttggttttcagactcatggttcttgtagctcttgtgaatttttttttcttctccttgcatgcattcttcaaattacatattgcatataccaggtgctctcctttattttatatttaatttttaaaattctatcatatattttttaatgtcaaacctcaaactaggggttcactgcatcttaggcttaccaggctaatatttctttacttaaccttttccctttatatttgctatcctcttgtgtagtaatcaccataagaagggtacaaactaaattaccctcccattcttttgtatcattctgaaatagtgtcacagagctttgatttttttgccctcatttaatctggcaaatgttctctctatttttttttttttactttcttttgacgggattctcaggcaattgttacggggagcagccagtcacactgtttctgtttattatgcaggtgagttacctgcccctctctgttatgattactgcgtttaagaagaccagcgttacaagacctcttgagggcttcggagttcttatcccttcgaatgagcaacataatggactgaagactctcggtaattgtctggttcacgtgtgtagcgaatcagattttcaaaccctgatttcgtaacattgcaggtactctgttttcatctatgatgtttccagatcgtgctttctccgatatgtatctctatactaccgtngttggaggaagcagaaatagagaacttgcaaaagcttcaacgtatgagatatgcaatgttttaaatgtatgctatagtcatcgtttcaaccttttggtgcctttttcttactaatttatcctcctggtttaatgatcttagggatgaattggagcaaatagtttcgtctgatctccaccagctgttgggcactgagggaaaacctacttttgtgaagtattgatatctttcacccaacttaacatgatttgtgcttataatatgttaaataaagtaactgaaatcctgaaattaagactacgaaactgtatggtgacagtcatttttactggaacaatgcattccctttatatgggcacaattacgactcagttctgagagcaatagaaaagatggaaagagatcttcctggacttttttacgcaggtaatctgtcatttgcttgttgcgataaagttcatgtacagttggcatatcaatcaacttgcattctttcttgctaactccaaacaatcaggatcattaacttgtaggctgcagcaacagagagtatctcccaagttgttaggtttcatgtaacctcgtcgctgagatgaaatttccgttggctaaaaagtgaaagttttgtattgatgttacccaaaacaaaagtattttgcatgttgcttgaagttttggttgtttcagatagtacatcctttgacatgaaaataaatggaaaagcgtatgtcaagcaattatcatctagtttctttgtttctagatactagccgcatttgatcccagatcatttttgaggaagtcagctgaaataccgtagctatccttcagttttcataataaaactttaatggatctgatgtacagtaatttagtgtgcaccgggttaataattgatattaacttcatatagtgagtcttataaagatataatgaacttatatacaatatagtggattttattaatggaaaacatatagtgaaactatatgcaatatagtatgatacataaagacttagacaacaagagcattcgaaattacaaagaacaaaggaaagaacaattgtatcaaaccggttcgaatgaacaaacaaccaccacttccacaatcaatgtaccaccaatcaagactaaactataacaatgagcttctagtttaagtctactttgagttttaatcaccaattcaacgattagatgatcaaaattgcaaaggttaagagttggtcaaacctaaccaagagttacactaggcacatagctttgttaggagtatattagtttatgaattctagttaagttagaaatccaatacctagttggattaggattcctaattggattagaattatagtttagttagaattctagtaatagtaggcgtgtgattaggagatataattagcttaattcttatattgttagtttaattcttatcctcgttttaggtttatctttagtcgaacttgtaccctatataaggggcctttatttcattaataatatagtttattttgagtttaaacctttacttgtgattgtttgcttgagaggttattaatcgaaccattaataacttttcaggattgttaagtttttagtgttaaacatcttaatttcaggagtgattttaagagtgtttagattcttgtattcaagtttcaggactgatcttgaatcaagaaatatccctagtttcgactaatatcataagtagttcgaattcttggagtcttttcttcaagattcatattcataacttgattatttagacttcttggttttgtaatcatatcaagtggtatcagttttccagggaggagaggatacaaagggttctctttgatcaaagaagatccaagggcatcaataagaatgacacttgcaataagttcgagtgatacaaacaacttcaagactcgatcttttgctaccaagaaccaatcttgacgcctgaagattgttaggacaaaggataagaagtgtttctacatccaagattgcattctttacgtccaagattgcgtcaagatccattctttaagttcaagaaaggagtagaaagcattcgaacactacttaaacatgacatccgagatggataagctggctatggccatgagtgccttggcacaatcacaaactgagtcacgcaaccacatgggtaggatggaggcacgtgaccgtggattgaaactagatgactatagtggagatggcaatccagaagacttgttggagtggatttgccaactaggcaaagtgagtgattataggggctttgatcacaagaagagattcaaggttgcttccattaggctcacgaagtatgctggaatacggctcgaaggattgcatgcacaaacttcttgcctaatgactatgaacaaaaacagttcataaggctcgcatcaataagccaaaacacacttagtgtacacgaatacagcatggagtttgacaaattagggcttatatgtgacatagaagagaaagagcaatacaagattgcaatgtacattaaagggttgaatcgatatatagccaagaagatcgaagtctcaacttatcacttctttgaggatgtgactaaattggctaagaaattcgaagagcatgacaaagaagaagggcctaagagttcttacacacctaagtatgactctagtgctaaagggaaatcaacagttccctactcaaggtggtcggaaagacctaagaaccccactacacctaaggaggacactagcatggagaagacaaaagtggccgtacctaaggagagtttaattttgtgttttatacatctttgcttaagagcttaacaattgaaactattaataacttttcaggatggttaagtttttagtgttaaacatcttaatttcaggagtgattttaagagtatttagattcttgtattcaagtttcaggagtgatcttgaatcaagaaatatccccttgttcaactattataattgatcttattcgagttcttggagttaatttcttcaagattcatattcatacttgattattagacttcttggtttagtaatcatatcaatatcattagcattaatttacccccagggagattaagaaaggattagcctaatcaaggcgcttaagaagtttttaggaaaaatcgtgcttgttaagcttaagaattgaacttctttcaccatttgcccttgattctcttgttgaactagaagatcttggttcatagtagatgctcctgcatcatagtagagcatttaattttaattttttaacatgcacgaagatgtaggtagtgtagtatatatcgtgagacgtggtttaacatatagaaagatgtagtttctgcatgatatagtgagtttttgcatgatatagtgaatgtctgaatgatacagtggatcgttccgaattgttgtagtttgtatgatatagtatttttgtgaatgatatagtgagtttcttcatgatacaatgggtttctgaatgatatagtggattgcttagaaatgatatagtgagcttttgtatcatgtagtaggtttctatgtgatataggttgttaaaagatgatacatgcttttggcctcatgtactctaatgttaacgtgaacccggtccttgcaagtcaattgcagttttttcaatattaagctatttttttttttttttttttttttttttttttttttttgtacgggaatatttagcatctttaccacaaacataaccatacgaatattatgcggaaattccagtctgaagtcttaacttttcaaaattaaaagcttctatattatttttggaatgaaaaaaaatgagctatggcatgttattttgaaatacaatgagtctcaaggtgcatagtggcttcaattctacgaataatgaatggactactgatttctaattttttgttccgggcttttgcattaggtaaccataaagatggactctctgtgggaagaactatttcctctggatacaaagctgcggagcttgtgatatcctatctcaactctacttaagatgcctaaatgatcgaggagactccgtaagtcctttctctgattctatctttgaactgagtggaaacacgactgtggtctaaagtagttgatgtctcagatatccagaaatggcgttagtgatattcaggagctgtccattgaccctttgattcattgttgcagtttactgaaagttgttagctggtctcagaaaaacgaaaggaaaaaagggggaaaacaaaaacaaagaaacgtagattgtggtgttaaaatcaagaattccagagatttgtaccttctttatcagttgaattgtttacagtgtgaatcaagaagttagctcgaccttcttttcttgtgaatggtaagatttcgtgatcatcaatacttgattgtgctgtttgcaacttcaacggtaagatttcctgatcttacagtttaattgcttgtgctgtttgccactt

SEQ ID NO: 23 - DNA, 1575 bp, synthetic construct
  misc_feature 1..1575: note = F420V mutated Beta vulgaris PPO2
  variation 1260: note = n is any nucleotide
  source 1..1575: mol_type = other DNA
atggtaatgctatacgattctcacctctcaggagtctcaactcatcttcaactatcgcaggcatttcccaggaagaacccattaatggccaaagtgtctgagccgggtaaacccacttctgctaaaaggattgctgttgttggtgctggtgttagtggacttgctgccgcatataagctaaagtcccatggcttgagtgtgacattgtttgaagctgatactagagctggaggaaaactcaaaactgttgcaaaggatggtttgatttgggatgagggggcaaatactatgatagagagtgaagcggaggtcacgagtttactcgatgatcttgggcttcgtgagaagcagcagtttccaattgcacaaaacaaaagatacattgcgagagacggtcgtcctgtgctgataccttcgagtcccattgcacttctcaagagcaatatcctttcagcgcaatctaagctacaacttatgttggagccattcctttggagaaaacgctatgcttctaagatttctgatgagcatgctcaggaaagtgtgggtgagttttttgagcgacattttgggaaagagtttgttgattatctaattgatccttttgtcgcgggtacaagtggaggagatcctcagtctctttctatgcgtcatgcatttccagaagtatggaatattgagaacaagtttggctcactaatttccggattaattcaatctaaactgtctccaaagaaggaaaagggtggaggaggaaagccttcttctaatgaaaagacacgcatacgtggttcgttttctttccagggtggaatgcagacacttgttgacacaatatgcaatcagtttggtaaagatgaactcaaactacagtgcaaggtcctttcattgtcctacagtcataaggggatcccttcttcagaaaattgggtcgtgtcttctgtgtcaaaaaattccattgaagatcaacaatatgatgctgtcatcgttaccgctccaatcagcaatattaaagaactgaagattctgaaagctggagttccattttcacttgacttcattccagaggtgagttacctgcccctctctgttatgattactgcgtttaagaagaccagcgttacaagacctcttgagggcttcggagttcttatcccttcgaatgagcaacataatggactgaagactctcggtactctgttttcatctatgatgtttccagatcgtgctttctccgatatgtatctctatactaccgtngttggaggaagcagaaatagagaacttgcaaaagcttcaacggatgaattggagcaaatagtttcgtctgatctccaccagctgttgggcactgagggaaaacctacttttgtgaatcatttttactggaacaatgcattccctttatatgggcacaattacgactcagttctgagagcaatagaaaagatggaaagagatcttcctggacttttttacgcaggtaaccataaagatggactctctgtgggaagaactatttcctctggatacaaagctgcggagcttgtgatatcctatctcaactctacttaa

SEQ ID NO: 24 - protein, 524 aa, synthetic construct
  REGION 1..524: note = F420V mutant protein of Beta vulgaris PPO2
MVMLYDSHLSGVSTHLQLSQAFPRKNPLMAKVSEPGKPTSAKRIAVVGAGVSGLAAAYKLKSHGLSVTLFEADTRAGGKLKTVAKDGLIWDEGANTMIESEAEVTSLLDDLGLREKQQFPIAQNKRYIARDGRPVLIPSSPIALLKSNILSAQSKLQLMLEPFLWRKRYASKISDEHAQESVGEFFERHFGKEFVDYLIDPFVAGTSGGDPQSLSMRHAFPEVWNIENKFGSLISGLIQSKLSPKKEKGGGGKPSSNEKTRIRGSFSFQGGMQTLVDTICNQFGKDELKLQCKVLSLSYSHKGIPSSENWVVSSVSKNSIEDQQYDAVIVTAPISNIKELKILKAGVPFSLDFIPEVSYLPLSVMITAFKKTSVTRPLEGFGVLIPSNEQHNGLKTLGTLFSSMMFPDRAFSDMYLYTTVVGGSRNRELAKASTDELEQIVSSDLHQLLGTEGKPTFVNHFYWNNAFPLYGHNYDSVLRAIEKMERDLPGLFYAGNHKDGLSVGRTISSGYKAAELVISYLNST

SEQ ID NO: 25 - DNA, 37009 bp, synthetic construct
  misc_feature 1..37009: note = F420M mutated Beta vulgaris PPO2
  source 1..37009: mol_type = other DNA
tattccatcgaatgtagcaaattgactgtccgttgcaatttcggagtttccactcgtcgcatggtaaatggtaatgctatacgattctcacctctcaggagtctcaactcatcttcaactatcgcaggcatttcccaggaagaacccattaatggccaaagtgtctgagccgggtaaacccagtaagtcaaacattcgaatcacaactcaagcaaatttgtcttgtttgcgttatattttgctcatttcagccttttttgtttttccgacctttgcatactgaatattgtgtgtgtgtgtgtgtggggtttcagcttctgctaaaaggattgctgttgttggtgctggtgttaggtaaattttcgtctcttgcagagtttttgagtcatttgggaattctatgtgaaacttgtaactcccttcagtccaacgaacgcagtacaattttctatcaaatcatggtcctaatttccaattttccatatatattgttggaattatattgggattgtctatcactattaatagtattaggatcaattgtagagaagcacagaaatttttgggatcgaaagaatatctggattgccacattaacagcagatataattcttccaattggtttttggttcttcctaccttgacttgtctggtcaaacattataaactttaacctttaatatccattaaagtaaactataggatttttttgtctaaaacatgcttatataacatgaaatttgtgagaaaccaccttatatatatttttttgcgaaaacaaaccttaaacaaaattattatcgtgagaacaaaccttatgccaatttcgatcattgacccaaggttttggcattgaccgtgtcatgaattttgttgggtttaaaaagtcatgtgtcttgcatacgaaatggtaaatgcgggaaccttgggtcaatgtttggaatccgcataaggtttgttctcccaaaaaatgtttttgttcaaggtttgtttttgcaaaaaaacttatataaggtgctttctcagaaatttcatgttttataaagtagtatttgacaaaaaaccctaaaatatattatagaattattattgactaaattgtgtaaaaatgtactcttctaaaagtacattatagtattttagtggaacatttgcgagaaactactttataaatacgatttttgcgagaaatttcctaataaaaaaatgtgaagtgcaaaactatcttattgataattttctactccctcaaatccaaaatactatgaagtctttcctttctggtttgtcccagattagtttgtacgcttccatctttggtatgatcccacttttattatacttattagttttacgtgagttccttactctatctcttttaacaaaaatactcaactatctctatccaataaaaagttccttactagtcctatcacatctgctttttaataaaataacgtttgataaccacacaacttatatccttaaaatacacgttcaaccaagtgttgagattaatttggacggagggaataaatattttttgaggcatattggtagcagtattcggattccgataggttgactatgtttccaatgttgaccaacacttgccttgcatgtaattctaactttgctcttttttattcttcatttccctcgtattccatatacaatgtttagagacccattccttcctcttctcttctttcccttccttactatgctttgccataatcttcctcaaatgagtgcaaattaatttgtcgttgatgtaggccaactgattgtagcacatcttcatagttcatacctcaacacactcgtaattatattataccctacatgttaaatggctcatgaagctttattttatatcatacttcctccgtttcacaataagtgtaacacttttcttatttggaataatcacaataagtgaaaccaagctccaaatggtaagaaaagttcactcttattacaaatataccaccaaaaagtaagaggggatcacaacttcaatacttcttcactctactttattgtggtcccaactttctctctctaaattccttggtaactccccactttctctatgtttcacttatggtgaaatggaggaagtattttgtagtggtatttagctactaggccttggatgatatacaatcatacaatgtatttatattcacgataatttgctgcccaccttgattaccatgatttccaccaattttatcaatttcagtacttcaccaccccgaatttatattttttatttccaaccttggtatctccatttgtctgagtgcccgatccatttgtatcgcctccagaattgaagaagcttcctgcagctagacaattaggaaggttaaaaaagtttggagatggtggaggatagccataataatcattgttgggaggtggaacttggaaggttattgtagggttgaagtccttgatgaagaagaattgagttcaaatgagaggaaaaaggagcagggaagagggacaataagaaaaaaaagggtaaactaaaatcacgtgtaaggcatgtgcagatcaacatcagaaagcatagtcaacctactggtattagggcactgatacctttttgggtcaaaatttttttacaaggtatttcatgaggtagttttgtccatttttttttttacaaggtatcgtctcattttttttttatcatttagtttctcgcaataagtgtatttcatgaggtagttttttccaaaatttcctcatttattataaaatacctcatcttttccataaataatgcaatgtctagacttttacgctgtttacacatgctcctttgaccatctattgacacacaaggaaaaatagagtagagtcatgcaggatcttgttagatttttctcgatatatactttcaaaagatcaatttttttataattttttttttgaggggattttttttttataattatgtacttatcaaaggtcaaagttgtgcaccgggaagcataaaactctatgtgttgcaatttacatggaaggggaggagtataataagagaaaattatggtaaaaggttcattcctggagatcatgagaaaggaagtagaaagaacaaaaaagaacaatgggagtgcttttcaatgtttgttgtacgtagcatttattcatttgctataatgttttgtgacattgtagtggacttgctgccgcatataagctaaagtcccatggcttgagtgtgacattgtttgaagctgatactagagctggaggaaaactcaaaactgttgcaaaggatggtttgatttgggatgagggggcaaatactatggtaatgtttttgattattgcaggtcttgcactttagcgcacaattaatttctggatttttttttgtactgtggtggttatggtcatcaacatgtctcacccactgtgcttgcagatagagagtgaagcggaggtcacgagtttactcgatgatcttgggcttcgtgagaagcagcagtttgtaagtctttcattatctgaatggcacatactttatttcgaaagattgtaattgccttttctttctagatggcttcatcttcatgttgctttctgattcagtttcgtggctaactttccaagtttgtctgattgctaactctgtcatagccaattgcacaaaacaaaagatacattgcgagagacggtcgtcctgtgctggtaagtttgcttgttttacttttgacctcttttaagatctttcaactctggagcctggaaacatggtgatgcaggaggcaagttctctctattttacatcctttcttctctgtatcttatgacatttgcctcttattctgtgcagataccttcgagtcccattgcacttctcaagagcaatatcctttcagcgcaatctaaggtcgttttatgttaagacatacttgatgctgagagtttattgaattcttaaccttcttcttattttttttttatttttttagcaaaaggtaagtatattgcatttaccaaaaaacagtatgtacaccaccacagcagccatgtcagaatctagaaataccaccgaaaaaatcctacacccaaccagagacagttatattatatcctactcctaagtttctgtacccaatttacatcaatattggtccatttacaagatatttttataattcacagaagcacatcagttttaattagtttaataatgacctctggatgaataaccaactcagaccatatagccttattcctggctttccggaagttgtacgccagagcagcaagcacagcaatgcaaacctgtttcttatacctccttttatgtgtcttagcccatctcttatagctagtgaagatacagtcgtgtgcacaggattgaaccccaatccaactagcgaaagcctcacaacattatgactataaatacatctgaagtataaatgctgcacctttttctcctcttgcctgcacggtatcagaacaaatcccagctttagctaacaattccctggttttcagtttattcaatgccatcatgcaagcaatgaaagaatgttttggaacattcagtttgttccaaacacagtgagagcaagggacctttcctgcagttccacttagccacttatatccctgactaatagtatgactctttgcaccgtaaattgatttcaacttaactttttcataagcagtgaattgtgtgttgttagagtgtctagctgtctaggagattgggagaaaaggagggaccaaggagatagaaacacacctttgtgtttctttgtgtatttactttttagggtgggtcacgttttctgagaaatttgggaaaaggaagaaatagtaacacactttcccatttgtataacctgtatactggagctccaatataatttgcatttttttttgagctgcaagaatatgttgacaaacagttattgcttcttcctcagctacaacttatgttggagccattcctttggagaaaacgctatgcttctaagatttctgatgagcatgctcaggaaaggtaatgtcaagacatgtgttacctcgccttaattttcgttccaggaggtgagcatgcatttagaactaaaaggcacaaagactgttggtggtcttgcctgttcaaatataatggagaggagttttcgctacatttaccctctcttgaagtggggttgaaatatagcatcaagttgaatgcttgattaagtttaaaggacttgtgtaactctttttctgtttactgtgattacatgacctggttgattaacataatggtctgtttatctgtagtgtgggtgagttttttgagcgacattttgggaaagaggtaatggtttaccatagtatttctgctttagtggtaaattgtaatgttgctgataattatacttcgctgcagtttgttgattatctaattgatccttttgtcgcgggtacaagtggaggagatcctcagtctctttctgtaagtgaacattttgtgcttcactcccaattttttggaggctggaaatagattcttttccagttgttctgtcaaaaatagatgtagctttattttgaatttgaagttcccaattgttcattttgactattactgattattgctaagagtggcattatgctattatgctcctaaaagaaaggtgaattttgacctacatatagtataatgtatcaatattggtttaattgtttgttcttttgttccttttggtgctcatcttgcgccttgttctcatcgctcgttttttcatgttgcacttgatttaaatttgctcagcttaacttgtctttttgaatttatattacttattgctatattttactaatttcgttgaaactaattttttgctgaacttttcgttttgttgaaatcatttttctgaattaacttgattttcctgaatagaattgaattttggtgatcttaccttttctgcagccttttatttctttcttgtcctttttccaatctcatttttttatatttccattgtgttgacatcttatcattaactgtgcagatgcgtcatgcatttccagaagtatggaatattgagaacaagtatggaccataagacgtttattttaatcgacatgtatgtttcttagtttatacatatattaattctgtggtaaaaaaaccgaacaagaatatctttttttttttctatcatcaaaaagggtgaatatatgtagaggaaaaagatttgaatcaagatattagcctaaagcaataataatgttagtaatagctttaataacaaattcaaaacgtacattaatgaaccgagaggccggaaaatagttaaagtgaccactaagagaagcgaaggattcatgatgggttttcaacccagtagggcaaatttgttcaatgttctttacaaatcaagcttattaccttgtgggtgtttttgctagagatgaatgatagaattttccctagttggaagtcttttttggttactttatgggagctagtgatgtaatttgtttcgccttatggcatttcctaacatgtgcttttgtgatgtattgaagctttttttttgccttaatttatgctggattttaattttgttctttgtttcatttttcttgcttttgaaaaaaatatatagatatgtatatattaggattggtcgaggattttgagggaagggaaagacctaagaaaacttggatgagggtgattgatagtgatatgagtctatttgggatcgaagaaaatattcctttggataaggtgtagtggagggttgagggagcaaatttatgcagattagcttgacttaaagtttttctttttgattatttttcatttacttgtgttttgcaaacatttactcatgaatgatgtaaacttcttcaaccaaatctctggaaaaaaataatctacatggaaaaaacattattaatgttaacttgacagagatcccatccttgtgaagcagctagcaattaggcatctaacaattgacattttaatggacaggatagaatgtctcttgatagtcaataccctctgtttcattgtatcccatagctactaatctagtttgtatctttccaaagaaccattattttgaagtttcaccttgaacacccattttgaaccaatatgtttcttgcccttggggagaggggctaattgccatgttttgatgcggatgcaaagacacttgttctacctgagcctattgacttgatcatggatactctagggtttgaactcaagggaaagaatcaagtcttggcatgtgtggtgacatggcgtggggatggagtaaagaagagtcatagttctgttaggatatgttcttgcttgctacatagaatcgtagttctgttaggattgctatgatattatatctagtagatagattttatagttaattaggataaacatgtgatgatcatgttataataggcatgtgattagaggataggattagcttaattcttatcttgttgttagtttaattcttatcctagttttatgtttatcttagtcgaagttgtagccatataaagggcgttccattcattaataatacttagttttgctttgtgttttaaacatacttcttgattattgtttgcttgtgagctaactaatcaaaccattaaagacttttcaggagttttagtgctaaacatcttaatttcaggagtgattttaagagcgtttagtgatcttgaatcaagaaatatccttgttcttgttcgactaatatcagtggttttgttcgagttcttggagttaatctcttcaagattcttattcaacttgattgttgagcttattggtttagtaatcatatcaagtggtatcagttttccagggaggagaggatagataggattctctttgatcaacaaagatccaagggctatcaacaaggttcaaacattgctgcttgttcaagacttgatctttttctaccaagatgcattctttacgtcacaaggtagtaataacaagattaagagtggtttttacatccaagaatcaatctttcacgtccaagatttcatctttcacgtctaagattcattctttaagatcaagaaagttataacaagcatagaagaacacataaccatggagtccgagatggacaagcttgccaaagctatgcaagcacttgcaaagtcgcaaactgaatcacagagtcgactcaatgagaatactaccacaatcaatgggattggtagtaacatgaataggttggaggcacgcatggatgccattgcaaccatcatacaaaagaagcttgatcggaatagtgccaacttcataggtgccaattcagaggaagagttggcagaacgtgaagaaagatcatccaagactacatacaatgatgatcgtggcttaaagttggatgactataatggagatagcaatcgagaagacttgttacagtggattcgacaacttgagaaggtatgtgattatagaggctttgatgacaagaaaagattcaggattgcctccataagactcacgaaatatgctggaatttggcttgaaagcttcaaggcacaacgagccaagaaaggtaaagaaaagttgtgtagttggacaaagttgaaagttcaagcttaaagagaagttcttgcctagtgactatgaacaaaaatagttcataagactctctactataagccaagacacgcttagtgtacatgagtacaccatggaatttgacaagctagggcttatatttgacatagaggagaaagaacaatggaagattgcaagatacatcaaaggcttgaaccgccacattgccaagaaggtggaagtatccacttatcacacctttgaggatgtgacaaagttggctaagaagtttgaagaacatgagaaggaagagaagcctaagagttcttacacgcctaagtatgatactaatgctaaggccaaggctagcttcctactcaaagtggtatgaaggacctaagaggctaagaacctcaccccacctaaagaagacacaagagttgagaagcctaaagtcgtcgttccaaaggagaaatttgaagagatgagaaagtgcttcaagtgtcaaggaaggagacacatagcaagcaattgtcctaacaaaagagtcctcaccatgagacaatacctagctttgcaagaagaggaggatgtctattagttcgtccctgatgaagagcaaacttaggggaagaagaggaggaggatgcttttgctgaggatgatgcaaggctagtaggggtcaagaggcgcaccttacatgtcgaccatacacctagcatggagcaaatggaaaaatcttttccacactagatgcaaggtaggtgactatatatgtaatggtataatagatagtggttcttgcactaatgttattgtatctgaggtagtgtcaaagctaaacttagctacaagggcacaccctaagccatacaagttgagtttgctagatgatagcactggcatgagagtaaagaaacaagctttgatttcattctctataggggttataaggatgagttatggggtgatgtattgcctatgagtgcatgtcatctcttgcttggaagaccattgcagtttgataaaaaggtcatccatgagggggactctaatgtgtactctgtgttggttggttctaagagggtatgtttgcatcccttagctcctcattcagtggcgccaaagcaaccacctaagacaccaagttactttctatcttcaagggagttcgaacaagaggtggaggaagaaggttgtgcttatgccttgattgtaagacatgctgccacaagtgtcaagactactagcaatgagaagctcgaagccttgatgaaagagtttgaggatgtctttctagaggaactacgacccttgagaggcatagaacatgctgtagaccttgtacctggcgcccctttgcctaacaagcctgcttataagtgtgatccagtggcatctagggaattgcaacgccaaattgaggacctaattgaaaagggctatttaagggagatcatgagtccatgtgttgtgccagctttactagttcctaagaaagatgacacatggaggatgtgcatagatagtagagcagtgaacaacattacagtcaagtaaaggtttcctatgcctagattggaagatatgttggataagttacatggggcatcaatcttttctaagattgatcttcgaagtggctaccaccaaatgaggatcagagaaggtgatgagtggaaaacaacattcaagaccaagcagggattgtatgagtggatggtgatgccatttgccttatgcaatgcgccaagctctttcatgagcttgatgaatgaggtacttcgtccgttccttaacaagtttgtggttgtttacatagatgatatacatatctatagccaaaatgtggaggaacacttgttgaacttgcgtagcttattcatgaagcttagagagcaccaactctatggtaagattgatggcgacgaggttgacgggggattatggcggcagtgaatcaccctctttgccggtcactgaaatacaacctgaggtatctttaaattctgtaattggattgactaacccaaaaactatgaaattgctgggaaaaattgctggatgtgaagttgtggtgatgattgaccctggggcaacccataattttttatcactagctactgttgagaaattagctattcctgtgtcggaatcggaaggatttggggtttctctaggggatggacaggcggtgaggggtagtggaatttgtagaggggtgttattgagtttaaatggtggagttgaagtggaaacagattttcagcctctgggtcttggtaattcggacgtgattttgggtgtacagtggctggagacgttggggacagtggagagcaattggaaaacacaaacaatggggtttgaaatcgagggtgtcaagttcactttgaaggtgacccatcactggcgaggtctcgaatctcactcaaagccatgatacgtaccttatgtaaagagggtggaggtttgtggcttgagttgaaccagattgagcattatcaggagaaaacaccgcattcatcagccttacctgaaattccagttttcttacagagagtccttacccaatttcagtctgtgtttgctacaccagaaggcttaccaccgataagagaacatgaacatgcaatagttcttagagaagggtgtaatccggtaggggtaataccgtaccgttatccacagttccaaaaagatgagatagagcgcctcatcaaagaaatgttggcttccggaatcatcaatccttccacgagccctttctcgagcccggtgatattagtgaagaagaaagatgggtcgtggcggttttgtgtagactatcgggccctcaataaagaaacggtccccgataagtatcccattcccgtgattgatgaattgttggatgagcttcatggggcaacacttttttcaaaactcgacttaagggccgggtatcaccagatccgggttaaggccgaagacactctcaaaacagcttttcgcactcatgaggggcattacgagtttttagtaatgccatttgggttgacaaacgcgccggcaacgtttcaatcccttatgaacgaggtcttcaaaccattcttgcgcaagtttgtcttggtatttttcgacgatatattggtctacagtagttctgccaggaacatgaggagcatttgaccttggtgttgcacaccctagcagctcataaattgtttgtgaatcagaagaaatgtgattttggcaggtcggaagtagcatatatggggcatatcatctctggtcaaggggtggctgtggatatggagaaggttcaagcgatggtggaatggccccttcctaaaaacctccgggaattacggggatttttgggccttacagggtactaccgcaaattcgtacttcactatgctcatatagccaagcctttaactgatcaactcaagagagatgcgtttgggtggtctgaggcagcaactcaagcctttgaaaagctcaagaaggcgatgatcacatcccctgttttggcaatgccggacttccaagagttgtttgtggttgagaccgacgcatccgggtatggtctgggggcagtgttaatgcaaaacaaccgacccattgccttttacagtaagttgttaggtgcccgggctcaattaaagtcgatctacgaaatggagttgatggccatctgcatggcagttcagaattggagatattatctgctgggtcgacatttcctcattcgtacagaccaacagagtttacgtcatctcactcagcagcgagaagtaagtactgccttccaacgttggatgagtaaacttatggggttcgattttgaaatacagtttaagccggggtgtgccaaccgggtagctgatgcattatcccgcaagacagtgggagaggttgaattgggtgcgctgatattaactcatggggtggactggaccgacttggagcgtgaaattgaaggcgatcctctgttgtgcaaaattaaacaagacttccacgggggtgctattactcctgtgcacttttctttggtggacaacaagctgttgttcaagggtcgatacgtgattcccagctcttcggtttttattcctaccttgctgcgagaatatcacgattctcccattggagggcattcgggggacctcaaaacatatctcaggatggctgccgactggtattggaggggcatgcgcaaggatgtggcgcggtatgtgcaacattgtagcgtgtgtcaacaacaaaaaatgtctcaacagatgccagggggggtactacaaccactccccataccttcctcggtttgggatgacttgtcaatggacttcgtggaaggcttgccatcttccaagggggtaaacaccatcctcgtggtggtcgatcgtttgtctaagtacgcccacttcctcccactacgtcatccatttactgctgtgtcggtggcaaatgtgtttgtcaaagaggtggttcgtttgcatgggtttccttcctccattgtttcagatcgggatcgaatttttatgagtgtgttttggcgggaattatttcgtttacatgacaccacactcaaacgaagtaccgcgtatcatcctcaaacggatggtcagtccgaaatcgtcaatcgagctctggagacttatttgcgttgctttgtgggggaatacccgcgctcttgggctcagtggcttgggccgaattttcatataatacttctcctcatctctctaccaaaatgaccccgtcaaggtcctttatggtagagaccctcctactgtgatacgggttaatcggggagcctcacctgttgaaagcttggaaaacatgctccaagagcgagacgcagtattagatgccttgcagattaatctgattaaagctcaacagaaaatgaagagtagtgctgatgctacaagaagagaggtgcattttaaggtgggagatcgagtgtacttaaaattacagccttaccgtcagaaatctttggcttaacgcccttatgagaagttagccgcccgtttctacggaccatttactattttacagaagattgggcaagctgcatacaagttacaacttcctgtttctagcaaggtgcatccggtgtttcatgtctcccaactgaaacaggccgttggttccattcccgtttcagccactattccagagcaattgtcttctgacttggagttagaggtggaacctgatgaactcctcgatgttcgtagtgtttctagaggccagcacacttacttggaagctctcattcagtggcagggattaccatcattcgaagctacctgggaagatgtggctgctttccatcaccattttccatccttccaccttgaggacaaggtgaaactttgggggggtggtaatgtgatgcaccaaactaccactccactactcacctattagaggcgtaagaaaaagggggtaaatcaggaatagtttacaaattctgttgaaaggaatattttgtaattatgatgtcagaggttgttagcaaaaaggcagtagagtaacaataaaaaggggaagggaggagagaagaaggtattgagatttttgtaaggaacttggcccttgggagagttgggagcctctcgaaagctcaccattatcttgtgaatattttccttcctggttatatacaagaaccttcctctgtcaatttcttttctctctaatcttatttcttattctgttttctggttgccattgtttgaagttgcttgttgtgcttgagtaaatacgtgaagtggtgaaacccatctgaattcatcacatctattccaagtggtataatacaagcttgtaatccaaatctaatgagaaatctaagttatgaagaatttcaaaagaactaagtacccttgttttggatgcccaaggatttacttgccgctcaagttaatgctcaacgtgcaagatacaacctctttagtatcccaaggtagtttccataagaattaattgagctcaaatcaagaacaatatttttatgtattaatgtgaacacttcctgaattatattagatatatggtctgaaggttggaagaaagattagcttttaattttaagtttgagatagtttttagaatcgaggaaagattagctcttaacttgtaaactaaggattgctttataagtaaaacattagttatggaactcttaaaattggttttgaacatttctagttaaaaatcccatgtaattctcccaaactagcttaaaatctcacatttcacaagctaaggagagacaaatggcgttctcttgtgaaacaatctaaaattttcattaggctactgttttcaagtatttatatgttagaagtgccgcatataggtacataaaataagtttacaaacacaagtaggaataaggaaaactaaaagagaaacttcagccatacaaaaccggctgaaatcagctactactttctactttctagcttcaaaatctgattgcaagtctcctttaagccaatcaccaatgaaaacctttcctccacatgaagtgtgctcaaatcaagagaagaaacccatcattcgcctatagctacctgggtcagatgaagatacggcaaaaaaaacgctggaaatcagtgaaccaaaataagcaccaattggatgctttctgtccttgctacattttcttctcataggactacttcaagccatacatgaataagcagttagatccagctcctagcatccatttgatcgtacaaatgagctccaaaaagataagtaaaaccaagcagccaaaacctaattaatactaatgatgaattagttgaatagctaatgacgatgaagcaacactttagtaggaatagtgttaattatgatcaatgctacttaatcttctgattaatttttggaaaaatgtcatatctaccttctgtatacacttattcataactatatcgtattattattatttttaaataactaccttttaagtaccaaaacctaagaaatcaggcacttgatggattccatccaaagatccatttggcggggcccactaactgacttttgattttttgcctttcctcttttggttaatctcaatggttcatcaataacaactcaatcttctccccatttcatcaaatcatccctaaatcagaactttttcaaattcacccaaatgaggttatggaaacctctaccaagtttattcgaccacttttagtctagctcaaagttttacacttgcttcaaaaactaagatttattaactttagaaattaggtttttatttttattttttatttaactttgtaacaatcttaaataactcaggtgctttctagagtttggctttaattgtttttcccttggttatgtgaaagaagtatgactactttctccaagactaaagtagagagcaaaaaatgcaattctggaatttcttgcaaaagaaaaggaacgagttaatgataatgaaaaacaaagaaaatgatgagaagagaggagctgaatcaatcatgatcatgtattttaaagttttttttgctattgaagtgacttaagaagaggaaagaggatgagtgaagacaaacaaaagaaaggataaatagagggaaatcttgggcttagaaaggtgaaaaggtaagaagatgagttagtgggccccaacaaatgtatctttggatataatccgtcatgccactgtttggggcttgcttaagtccatacattacttcactaattttacaaaatttattttcttgaccaagaactgaaaaaaccttcagtggtgatctattaggttttggaagttaaaaggtagttatttaaatgtttttaatataaaaggtagttatttagatatttttaatataaaaggtagttatgtgaataaaagtgtatataaaatgtaattttttgacatttttgccttagtttttcttgctaattcaccttttcaacttgaccaagttgctatgaggagaaaacgagcaattattaagcaaatcgcaacactagcattaatccatggcccatgaaactctccataattagagattggattagcacttagtagaacttcttgctcctgctccaggtttccattacttctttatctaagtgcatcaaaaggttgttgggttatgaaaggtggtggttgtgtatagtcattgtcaaaatgttgttaatgcactctatttagaggatgagggattgaatagttttcacctcgtgacctttcattcctttttaaaaaaattgataatgtgtattggtcctatgactgtatgaatggtaataagctatctcatgagctgttactatcttcctcagagtctaggtagaagggtttgggctgataattttctactatgtgcaattagtttgttggatttggatatgctagttgatataggtcctttcccttgggccttctcttaatataggcctacagtgtgattgaagataaatcttctggagaatataagaacaatgagatggattggttagaggttgatttgttcttttggtgtaagactatttcgggttctctattggttatgttcagacgccagaatatgtgttggtgattgttttccatgaacatactttatccgcagagacatttttcttttttcttcctataagattatatttgtttcctctcttggtgctcatctcagtgtctctactttacgttaaactgttgacattacttgacaatgcgtatatttgtcgcatggtgctcttccctcactccacgtcgaccccatacatcaaaaaatgccattaaagaatattcgaactcacaaccttgtgttgaaagaatggaatccctaccaatgactcattaattcattttctctttaagaaataaatgatttcctcacaaacttttaggctttaagagcccaaaagataaaaacataaaataagatagacatcaacgtcaagattagccttaaatgcacaaagcacatgtcaaatgattgataactactcacgagttgcaactctttgggcgttgcctaatattaattggatctcttttaaaaattgttggtggttatggttggtggagaggaccatgtaacttttagctggtcacaactggtaatgattgtcacttttactgcccataaaaaaatttaaactgttgaatatgtttctggcagtggatctgacaaatcctttacaagttggcgtccattttgttttgccatgtgactcaattataatacgtgagttttattatccaccaggtttggctcactaatttccggattaattcaatctaaactgtctccaaagaaggaaaagggtggaggaggaaagccttcttctaatgaaaagacacgcatacgtggttcgttttctttccagggtggaatgcaggtattagcatgtagctttcattctgttaacatttgtggttcttccagacatacatccaatgctttttttttttcttgctataaccataaacattcttgtcatgaacattctttaatactgttgctgagcttagtgtattcgttcattcatgtaatttcctctcttgaggttaaaatggcatacagccttacaacctatatccataatgctccttagagtagaatccctaggttataacatagtaccacttatcaaaataaacatggcacacactgcaggacaagaagtaaatccacctagagaactgagcacctagtagtaaaagcagcgatacattactaataacagtagcagggccataagagtagtaaatgggcctcatttcaacactccccccgtaatggtgagagagaagaagcagtctgaactcccagcttggagagcaaaatagagtgttgctgaacagggagaaccttagtgaaaacatctggcacttgatcttgagatggaacataggtaggctgaataaccccttcttcatttgtattgtccctcaggaaatgacaatctatgtctacatgcttggttttctcatgatgaactagatatgctgctatggcaagagcagcttggttatcacagtagataggagtagcactggactttttaatgcgaagatctttgaggagttgtttgatccacatcacctcacacacagcaagagccatggatctgtactctgcactgaccacaagaaattgcctctttgactttcaagatacggggggagtcaccaaggagcacacaaaaccagatgtagaatttacaacacccatcccattcactatcacaaaatgctgttagttgagcactagacttgttcgccatgagaattcaccctgttggcagcttgaagatgcacattagtggggcagtgcataaatttgcttaaatcatgtatagtgaaggcaatatcaggcattgccttgtaatagtgagataaatgagcttccccatcaatttttgatacacatcaggttgttgaagaggatcaccattgtcagcatagagcttgacatgtgagtccatacgaagcctcaatcgtctgcaatttataaaaccatattcatcaacaagacccatcacatacttctttagagataaaaacgatacttcactacactgatccacttcaatcctcaaaaaatatcttaggccacccatatctttcatgtgaaattggccagcgaagaaactctttgcttcctcaatagttgctaaactattgccagcaagaatgaggtcgtccacatacaccaatatagcactgaaacagtgagagttttgcttgaagaatagagagtagtcacacttggattaagtgaatacattttgctttaaagcagtgttagcttggcaaaccattgcctcaaagcctacttcaagccataaagtgacttaagcagcttgcacaccttagttcatttggtgtcacttctgccatcagtacttagctccccctctccttgaactttgatcctgttacatgtttcactatatcctggtgatagcttcatgtatacactatcctacaattcaccatgcaaaaaagcatttttaacatccatttgtttgcaagaaccaaccctctaaggatgcaacaacaagcatgtggtcatctttgctacaggggtaaaagtctgctcataatctattccatatctctgtctgtcacccatgattacaagccttggcttatgcctattatttgtgccatcagtgctgtattttgttctgatccatccatgtgagggatggctcatttctacaaaatcctagttccgttaggatttgtgttgttttcctaattctagtaggaataggactcctaaaatcctaatcctcctagttctgttaggagtttaaaagttttagtttgattgtaattctagttgtgttagaaatccaaatcctagattcatgtcacgtatggttagaacatggctagtaggataatttgtcttgtgatgtccatagccttggcatttgtggcacctaactttcaatagcttgtcttctgtctccttttctttctccttctttgaggaatcaacgtttttagagctatctaaaccactagcatcaatattaggtttaaaagtgctaaaagatttcgaatagttcttacttgcatacaatttctttttctagtttatgtagcgtcaccagggaacaaaaactcggccgttccgttctggaacggccgctttgtaacggatttcagagaggccgttccgttaaataccgttctagaacggtgatttggaattcacaccaaactcggcgcgatagcgttacgtaacggtgtaacggcgttccagaaccgttacaatcacataacgtccgttatttgaagaagaccagttcttttggtggaggaagaagaagagccaacgcaagatctatagatctgagttaaaatttgaaaataaaacatgtttttttatttaaattaaagcttacagaggatgtagaactcaaattcgagtaaacccctcctttaatttcattaggttactgcaaatcgaaccctaaattgcaaaccctaatttcgaaaaaaccctaatatgcattgggatgcaacgctgcttctccggtcatggcagagaaggtcgacgagtcatcttcggctgcttttagcactgtagctgccggtggttggcttgtttgcaggttagtgcttgctggttttctttctctcataccgatcatcttcttcttttctctcttctctttttcttttttattgtgtgactgccagtcacgtgataattgcaactcataaagtatctctttctctctcttcttttcatccctttttatttttctttcccttttagtttttattccctcacgtggaatcacctaattttcatccttttttatttttttagttacactcttacacagaagtatgttcaaatatcattatagtacctcaaatattgtatttataagagttttggacataatatgatatagaaagtaaaatagaagaaaaataaagtttaaatgtcacttgtgtgatttttttaaaaaaattcacgccgcgacggccgcgaaacgttctatttcccgttacaagccgttcccgcgataacgcgaccgttcccgcgaacgcgaccgcgaccgcgttttttttccttgagcgtcacatcttgcaagcttcttcaaaggtgagttatgtgtacaactccaatttctctccaatcccctccgtcctcatttaggcctccaaggaagctacttaaacattgatcttcaagttcatcaattttccaaagaatggataacttctcgaactcctttatgtaatcttcaacggacatattcccttgtttaagagtagaccattccatgtacaagctttgtttgtagttagaaggaacaaaacgtcctcttaacaactttttaagcttatcccaagtagagattttgggtttattagctttcacacgctgcctctttactccatccaaccaaatagatgcatatttggttaccttaagcacggccaccttgtatttcttttcttttggtgtctcttaatcccaagtagagcttttgcgtgtgaaagctaataaacacaaaatctctacttgggataatcttcttcttgtttccgaaacaactaattcttatggtagttaggaaagcaagaatggtttctaattcaatagggaatatattaattattattagtttaagttaaatagtgcacgaatctaaatagattattcgtctcaaaatctcacttaagtatagatttgtttggacatctgagggaagaagaagagagcgagataaaggagaattatcactcaatgaatccatatcccgagttttcccatttacttctttgaaagcaatatagttcacgaggtcttattatcagtctatggacataagagtaataatttaagggcaaaaactatgactttatgggtttaaactgatacatgttctgttaaactgatagatgttctgtgttaaaccgatactcatatattcctggttaaactgatagatatatgatttaaattgatacccgtctcagtcatgtcttggattgagacggtctgacacaagactttttgtgtattatatatctgattagaataaatttatcctgtttactaattattttatcttctccagacacttgttgacacaatatgcaatcagtttggtaaagatgaactcaaactacagtgcaaggtcctttcattgtcctacagtcataaggggatcccttcttcagaaaattgggtcgtgtcttctgtgtcaaaaaattccattgaagatcaacaatatgatgctgtcatcgttaccgtgagttttactttgcttactgctattgcaccaatctttcttcttttgacacactgataatggcaatgctgttgtggtttgaagccatgttatggggttttagggatatttatggagtctgatctaatatgttattggataaaattcagatctgtaacgtgactcaatgagattgaaaaaaattgaatcaagataatggattggaaaattaggagctaacctagggtctataagcgatccacttggagtctcataccaagcaggtattcgacattttaggtttatattgctgctatggctcatatgggagcctacatagggtctggtgcttattcctttttcttttgtctagttttggggctgcacatttctgttgtgttttgatatggatagccatcacctgcaattgcatggaggctgaactaagttctataggggagcaaacagtatctgttggaaatttattttcatattgtgtttttaaatgctataatccaaaatttgttgttcccctaaaatgcctaaaatacccttatgtaactgctccatctgtcccttaatagacttcccatttctccaatgcatgtttgccaatacacattttgtattgttaatatcaaaaattacatattagtaaaaattataaaagtttgattttcctaatgtacgcaatgagacgaatcaaacaagacgccatatgactatgttttttcttatacttcctatgttttttaataagtgacatgttttccttttagggaaatgtcacaataagtgacacatagctcaaagtagtaaaaatacttctcatttattacatctttgccattatttaattgtttcacctacctactttatccaatactcaaatttgattggttgaacaattggtcccaactttctctagactccttggtattccctttcccccactttctctctgtgtcacttattaaaaaatggaggacgtatattggaaaaaaattggaaggttttcttcacttatgaatagtggtaaaattagagatgggaaggctattttgggatggatggagtaatatttaaatttttaaaataatgtcattgttttagtgatgaaataaaattcaaggctattttttctagtaattatgttatctgtacatcaccacacgtatcgcgtgcatataagactagtttgatgatattccaacactgttcgaaggaagtcaggcatggaaccatgtttgcttccatatgggaaatattttgcttactctccttcaaacatctacctcattatcccagaatgattgatcgaatctaatacaaatatacaattgatcatatgccaccagggaattacatcaaattaaatttttatagaaggggaatcagtcatagcctcatagggaacgaataagtgatactcgccagtttctttcctggttacttttcctcttctcactagccatcctttatgtatgggtatgctgcatcattcctgccactggttgggactcccgtttgaactatggggggatgggaaagctaagccatcatcttcaaattgagtttcttgagaatgtaagacaccatctgtaagatgaatatagtgcactctatagtcaatgtcatgatctttatgggtttatctgctgaaataactgtgatatacccagctctccatttacaaagttttcctacatattaaactcttgcccgcaattctagaacttcattgtagaacttttcctacataagcatcatttgtcttttctgtagtaaaagttagaaagagctttattttagaacattcgtttttagttttctttgttgttgattactccgccacttttaatacttttatgattcaagtatttgacaaaatcatgtaatttaggtcctctgctgcatgcagtctataccctctctctctctctctctctctctctctctgtggttgtgtcttacttgttgagttactaactccagccattacataaagtaggctggcattatgatgagcaaattactcaagaccacatgttagctcctttttcttttctccttattctgaaaggcaaatataggtccatcttggtgcttctcatgtcataagtaagctgaccccctccttttccagggaataggacaataatccaaaagtgagggttttacatgttgggatttgtgaagtttcttattttacttaatagccgagtcagtgttacaatacatagtaccgtgttacaaaatagtatgtaacaccaagcatgtttatgtgcaaaattgtgcaagactttgttgctggcacgccaagggctgttttaatgtagtttacttattcttttaggtttttcagatgacaatcataaagggaattaggagtgtttttattgtagtcaatccctattgtgctacaacgataaaagaaaaaagcacaagactagaaggagaagtaatgtctaggaaagactcctcacctggggttgctagtcacctacacatcttagaaggcatcaaaccaaagcttattcccctcgactgttttcgggagaaaagaagacaaaattgtttctaacttatactttaccagtttcactacagcatcagaaagaagcaaaatatgctcccacaacacggcgaacctagctttccagatgtgataaaccagaccagcaaaatgattattttcactagagctttgagtctattttttcggtttttccccttcttcctggtaatgtcacgccaccaagccatcatctcaattttttgagatttgacgtaatcgctcaaatagctgagtaagacacttcttgctctaaatactaataaaaaagaggtgaatgtgggtctcagccatgttactcaaatcggataaagtgtctactcttattagggtttttgggtgttggactcatccatttttttttgtaaaatgtcaagattttggtttgaaatgagagattcaagtgtcgtgacatgagtcggcacgcaacacttaaacgtgtcgaagtaacagagggtctcagacaatcaactttaatcaatcacgaaccccaaaatttatgcaacctttgctcatattcagtctctgtaaagcactcaactgcagcacacccacccattcgcttcacctacagcaggagggcacccaagtaattgctatgatgagcgaattattctgttttgccttgctggaatattgctgttagatttgctgactcactggcagttaattatagtcagagaatgagaaatatcctgtagagagagaaagggtatcttttgtatttagctctataaatagctaaggaagggaagggcattgagagtttatgatattataataggagagatttagcctctcgaatgctgataggagcgtagctcttgttggattatcaatactactctgtttgctctatctatttctactcaggttccttcttgtacagtggatccctgattggatttacttcatcaaccagcagataaaattatttgtaggcacattgaaaccattccaaacctaatgaggccaaagtttatcacaaagaatataggagccaaatgtaggcaacagataagagtataattgccagaagttgaagactccaggtattgttcagaaaccttaatgcatatcatcattctgacactagattttccccggagccaactaacaaaaatgaattaaagagattaaggctatgtttagttcacctgaaattttctgatctgaacttatctgatctgatctgaacttattttttctgatctgatctgatctgatctgaaccaatctgattacaagatcttatcttttagatttttctcaatatataagaaaaaatatagtcatgtggggtcttgtttgattcgtctcaatgagtactttattaatattcaattattataatttttactaatatgtaatgaaagatataatgatttttaaatataagcatgatctgaactgatctgatgtgaacttattttttctgatctgatctgatctgattagatctgaaataagcaaaaataaggtgaactgaacatagcctaagcaacaattgagggaaaataagatcattatggctaagataagataaatatgtaatgataaaatcagagtaattatatcagttacactctcaacattcgtcagattgaggtttcctcccaaaatgccaacccacttttctgtattttcacgtccttctctctacccttctaggtatatattacatcagctgtaaaatttttgaaccaactagtagaatactgatctaccctcaactgcctcactttctcattttttctgggcctttttctctctagcacaagtccacataagtgatgcatagcagaaatataattccactagtcatcctcaatattgatataacaaacacatcacccacatattatcatttttaatcgctgcatgcgaggcatacttacccaccaatcaggatatgcataacagcgttcctaattccaaaaccaccatatatcttgggtttgcaactctcatccctagcaacaaggggactttctgaaaaagtggcagattccgcccacaagtagtttgtacggacacctttattatattattaatatcatatttcggcaacacaaattaccagcccagtaaaacatgaattgacatgagactaacaaggggcccaatctaatatcgtacgtctgtactaagcaatgtataaaaaaaagctcaaggtgcattgatgcaatagggatcctaatgtgcataggtgcgcctcattgaagtgaggcaccactaaggataaataaaaaagattgatgtaaaattaaattgtgcaccttgggtgcgcctcgatgaactttttttgtgtgcctaagtgtacctcaagtacgcctcattgatatcgcctcgcctggcagaaaacgagcttgaccccaatcgccttgctccccaccgcctaggcgtgcctcagtcacactttttaaatacattggtattaagtactcagaatggcaaaaagaaactttgggcattaattagacatttcactttttgtgcaactatttgtgacttcagagattgatatgttttctacattacagacttttgtgatggctgcatggtctccactgtcaaagaacattagtttaagtagaagaaatattgctctattaccttcctccctctacaaacaaaatcctaaaatgtggttatgtagtgccaattcaaacttgtagatgcatgactaatgctttcattatgctgtgggtttttatactatgattcatgtccaattacataacaattagctggagtcaggatatgtcacggaaattttaagcctggcaggatgattgtttatattttctctttttcggtgtttaagtcaaagtaaacttctaggctgctcttttataggctagttgggctgttggggagatctacacattaagtgtgaagaaatcttgtctaactccagtttggttgagaactgtaagctgtcataacatttgttgcatgatgaggccttgtgggattatcatgttagctgtaaactctaaacttacttgaaatctagtgttgtgtctccttatttctgtagtcaaaattgaaccttctgtacgtttttgatacctgcgactagaatgatggaattctgaattactgatactattacaaccatctgctaagaacgaagatgactcttagctaatttctcagcagatttagagaaattaagaagaattactaatgaatatttaaagagaaaactaccaagatatgattgtattgatgaaaaacaccaattacaacctaaccaacattcgagaggttggagctctcccaagtaaccatttctctcactaaacttatcaattttcaagatgccttttccattctcagttcctctatatttatactactccccttagcaaactacccaacttattccccaagtaaactaaagagataatatctaaaatacccttccccctacaataatattagttcttagcattaccggccccctaaacttccaccttgtcctcaaggtgggtcgtaatcatcactaaattctgggcctctactcgtatattcagtgtcttgcagcccttcaggccccaagcctaggttatgcagctcgtgttgcggctcctcctcatatagttctctggctggagtgagtgcctcaactataatgaaaaagtcctggaggtggggaaggaaggagtgtctgaaatggtgtggtgtgctgctggtgttatgggcttgtgcctgaaagttttgggtttaaagagatggagtggagaagagtggagaagtgactggagacgtaaaagaaggaatcataatttttgtaagtggtgggttgaaaaagttggtgggaagaattgtttttataaaatgtagtgtaatggtcgaaaaatgggtggagtaagtatggtttttggctggggatgtggtactgggttgaaaataaataggtctgagcttacttgtaaaattggcctcaacatgagcaggcccaatatcttgagccaattccccaaaagctggcaatagagcactcttaattgcattgttgtgggccatcgggctccaaacatatattcggaggagccggacttctttggtgatgtcattagcttggcccattgcacactttcccttaacagcctcaagatcttttcccacttttgtaccccaaccacgtggcttcaccatcctttctttcttgcttttgtcacttttttggcaatatacgagtttgtccttactaccctcatcttctaatgttggcttcctcaccaagcttaatttctggaattttgtccaccaaatcccaccacccatcgtcaacaccatacctatctacaccggccaagaagcctggtcctccacccgaattttcgccacagacaaagcctgaacaaccgtcagttctctcaccggagaagttcacaggtccaccacctgacccactagttgctgatccacccttcacaaatctccctcctctggctgccacaagtagtggttcctccgtaatactcatatttctcgtccaagagccctggaccaccaccggacccacttccaccggcaccaacttgttcaaatgatacttctctttcttttccaaacagcctacttggactggaaaaaccactgcgattgtagcctccgccagatctgtagcctagtgcacctaacgtgcttccaactgcaacccaatagggatggaaatggatgggattcggggagggtggagcatcacccgcatccgtcacccgcatccattcgctccacccgctccacccgcatccatccatccgtcacccacgggtgaaacgggtgggtcggtgataaacgggtggaaccatttagggggtgtttggtatcatgtttttttacaaaagaaacagaatcaagtaacaaaatccgtttctacttgtttggttctatgttgctcagactcgagtacccatgtccgacacgggtacgtgtccaagtgtccaactcagctattttctagaattttttatattttttaacccaaaacaaagtgtccaagtgtcccacccatgtccgactcccgaggatccgacacgggtacttgaggtgaaatgaagagtccgagcaacggaggtttggttagtgtgtaaagtaacaattaccgttacttgaggaaaacacatccccccaagttgtttccattcaaaaacctaaggaaacaaataacgtttcactcctcaaacaagaggaaagggaatgggttatatttatttccattccattaggataccaaacaactaataagggtaacacttattattatcctttcccctccttatcaaaatcctttccattccgtttacggtattcataccaaacacccccttagtatattttctaatgaaatttgtgatatgatatgcatgatataaaataattctatcaaaaatataaaaagtaagtaaacttacatgtacaacttaatagatgggtgatgggttggaggttaaacgagtgatggatcgggtgacgggtgaagaaattctcacccaccactcgctttccatccatttaaattaggtttttcatccatttaaaaaaccgggttaaacaggtgatgtatgatccatcacccatttccatcctcaaacacatcccgatttgtttactgcaccaccagatccaccagtataaccacccgaaaaatcatcatgccttctactagccttgtaacctgctcccggtgagaagcttcttccacaagtggtggtcgctggacctccatctccttcttccccaaaaaattttccatgacacccactcgacccttcatctgtgacaacctcttcttcgtccacctctgaagttttggggtcgtcttcctcctcaagctcctcttgaagtaactttaacttccgttggatgggagagaacgcttcattgattatcttcaccagatcttcttgaagtttctcgaaactttttctcacgttttcctctacctctttcgtgatttcctttccgatctccttcatttttagactaggagctcttgcgattccatggcagatttctttttttaaaacaagaaaatcaggcacttaatctcccagaatagtggtgctctgataccattttctaagaaccaagatgactcttagctaatttctcagcataacaacaaatttagagaaattaagaagaattactaatgaatatttaaagagaaaactactaagatatgattgtattgatgaaaaacaccgattacaacctaaccaagaggttggagctctcccaagtaaccatttctctcactaaacttatcaattttcaagatgccgtttactactccccttagcaaactacccaacttattccccaataaactaaagagataatatctaaaatacccttccccctacaatattagttcttagcaccatcaaactgggatggatggttttgtaaggttccaatttacttctccatcaaaatattttaggattttttatctcatgtattttagagtttcctcgtccctttttatctgataagattcttctgatgatttgattttatggtaggctccaatcagcaatattaaagaactgaagattctgaaagctggagttccattttcacttgacttcattccagaggtttgtatttttatagtggttagacatgcttcccctagttttcaaagtaaaagcatccttgttgtgacgatattttttcccttgtttttgtttttattattatcatcacttatttccattttctattttccatgctgataagatgttcatcaccataatcttgtggtatcagaagtgtttagtggagtttattcactacacatgcagttgttcttttgccatgaccgccattcattttctcgtcaaaacaaatctatgaagtttggttttcagactcatggttcttgtagctcttgtgaatttttttttcttctccttgcatgcattcttcaaattacatattgcatataccaggtgctctcctttattttatatttaatttttaaaattctatcatatattttttaatgtcaaacctcaaactaggggttcactgcatcttaggcttaccaggctaatatttctttacttaaccttttccctttatatttgctatcctcttgtgtagtaatcaccataagaagggtacaaactaaattaccctcccattcttttgtatcattctgaaatagtgtcacagagctttgatttttttgccctcatttaatctggcaaatgttctctctatttttttttttttactttcttttgacgggattctcaggcaattgttacggggagcagccagtcacactgtttctgtttattatgcaggtgagttacctgcccctctctgttatgattactgcgtttaagaagaccagcgttacaagacctcttgagggcttcggagttcttatcccttcgaatgagcaacataatggactgaagactctcggtaattgtctggttcacgtgtgtagcgaatcagattttcaaaccctgatttcgtaacattgcaggtactctgttttcatctatgatgtttccagatcgtgctttctccgatatgtatctctatactaccatggttggaggaagcagaaatagagaacttgcaaaagcttcaacgtatgagatatgcaatgttttaaatgtatgctatagtcatcgtttcaaccttttggtgcctttttcttactaatttatcctcctggtttaatgatcttagggatgaattggagcaaatagtttcgtctgatctccaccagctgttgggcactgagggaaaacctacttttgtgaagtattgatatctttcacccaacttaacatgatttgtgcttataatatgttaaataaagtaactgaaatcctgaaattaagactacgaaactgtatggtgacagtcatttttactggaacaatgcattccctttatatgggcacaattacgactcagttctgagagcaatagaaaagatggaaagagatcttcctggacttttttacgcaggtaatctgtcatttgcttgttgcgataaagttcatgtacagttggcatatcaatcaacttgcattctttcttgctaactccaaacaatcaggatcattaacttgtaggctgcagcaacagagagtatctcccaagttgttaggtttcatgtaacctcgtcgctgagatgaaatttccgttggctaaaaagtgaaagttttgtattgatgttacccaaaacaaaagtattttgcatgttgcttgaagttttggttgtttcagatagtacatcctttgacatgaaaataaatggaaaagcgtatgtcaagcaattatcatctagtttctttgtttctagatactagccgcatttgatcccagatcatttttgaggaagtcagctgaaataccgtagctatccttcagttttcataataaaactttaatggatctgatgtacagtaatttagtgtgcaccgggttaataattgatattaacttcatatagtgagtcttataaagatataatgaacttatatacaatatagtggattttattaatggaaaacatatagtgaaactatatgcaatatagtatgatacataaagacttagacaacaagagcattcgaaattacaaagaacaaaggaaagaacaattgtatcaaaccggttcgaatgaacaaacaaccaccacttccacaatcaatgtaccaccaatcaagactaaactataacaatgagcttctagtttaagtctactttgagttttaatcaccaattcaacgattagatgatcaaaattgcaaaggttaagagttggtcaaacctaaccaagagttacactaggcacatagctttgttaggagtatattagtttatgaattctagttaagttagaaatccaatacctagttggattaggattcctaattggattagaattatagtttagttagaattctagtaatagtaggcgtgtgattaggagatataattagcttaattcttatattgttagtttaattcttatcctcgttttaggtttatctttagtcgaacttgtaccctatataaggggcctttatttcattaataatatagtttattttgagtttaaacctttacttgtgattgtttgcttgagaggttattaatcgaaccattaataacttttcaggattgttaagtttttagtgttaaacatcttaatttcaggagtgattttaagagtgtttagattcttgtattcaagtttcaggactgatcttgaatcaagaaatatccctagtttcgactaatatcataagtagttcgaattcttggagtcttttcttcaagattcatattcataacttgattatttagacttcttggttttgtaatcatatcaagtggtatcagttttccagggaggagaggatacaaagggttctctttgatcaaagaagatccaagggcatcaataagaatgacacttgcaataagttcgagtgatacaaacaacttcaagactcgatcttttgctaccaagaaccaatcttgacgcctgaagattgttaggacaaaggataagaagtgtttctacatccaagattgcattctttacgtccaagattgcgtcaagatccattctttaagttcaagaaaggagtagaaagcattcgaacactacttaaacatgacatccgagatggataagctggctatggccatgagtgccttggcacaatcacaaactgagtcacgcaaccacatgggtaggatggaggcacgtgaccgtggattgaaactagatgactatagtggagatggcaatccagaagacttgttggagtggatttgccaactaggcaaagtgagtgattataggggctttgatcacaagaagagattcaaggttgcttccattaggctcacgaagtatgctggaatacggctcgaaggattgcatgcacaaacttcttgcctaatgactatgaacaaaaacagttcataaggctcgcatcaataagccaaaacacacttagtgtacacgaatacagcatggagtttgacaaattagggcttatatgtgacatagaagagaaagagcaatacaagattgcaatgtacattaaagggttgaatcgatatatagccaagaagatcgaagtctcaacttatcacttctttgaggatgtgactaaattggctaagaaattcgaagagcatgacaaagaagaagggcctaagagttcttacacacctaagtatgactctagtgctaaagggaaatcaacagttccctactcaaggtggtcggaaagacctaagaaccccactacacctaaggaggacactagcatggagaagacaaaagtggccgtacctaaggagagtttaattttgtgttttatacatctttgcttaagagcttaacaattgaaactattaataacttttcaggatggttaagtttttagtgttaaacatcttaatttcaggagtgattttaagagtatttagattcttgtattcaagtttcaggagtgatcttgaatcaagaaatatccccttgttcaactattataattgatcttattcgagttcttggagttaatttcttcaagattcatattcatacttgattattagacttcttggtttagtaatcatatcaatatcattagcattaatttacccccagggagattaagaaaggattagcctaatcaaggcgcttaagaagtttttaggaaaaatcgtgcttgttaagcttaagaattgaacttctttcaccatttgcccttgattctcttgttgaactagaagatcttggttcatagtagatgctcctgcatcatagtagagcatttaattttaattttttaacatgcacgaagatgtaggtagtgtagtatatatcgtgagacgtggtttaacatatagaaagatgtagtttctgcatgatatagtgagtttttgcatgatatagtgaatgtctgaatgatacagtggatcgttccgaattgttgtagtttgtatgatatagtatttttgtgaatgatatagtgagtttcttcatgatacaatgggtttctgaatgatatagtggattgcttagaaatgatatagtgagcttttgtatcatgtagtaggtttctatgtgatataggttgttaaaagatgatacatgcttttggcctcatgtactctaatgttaacgtgaacccggtccttgcaagtcaattgcagttttttcaatattaagctatttttttttttttttttttttttttttttttttttttgtacgggaatatttagcatctttaccacaaacataaccatacgaatattatgcggaaattccagtctgaagtcttaacttttcaaaattaaaagcttctatattatttttggaatgaaaaaaaatgagctatggcatgttattttgaaatacaatgagtctcaaggtgcatagtggcttcaattctacgaataatgaatggactactgatttctaattttttgttccgggcttttgcattaggtaaccataaagatggactctctgtgggaagaactatttcctctggatacaaagctgcggagcttgtgatatcctatctcaactctacttaagatgcctaaatgatcgaggagactccgtaagtcctttctctgattctatctttgaactgagtggaaacacgactgtggtctaaagtagttgatgtctcagatatccagaaatggcgttagtgatattcaggagctgtccattgaccctttgattcattgttgcagtttactgaaagttgttagctggtctcagaaaaacgaaaggaaaaaagggggaaaacaaaaacaaagaaacgtagattgtggtgttaaaatcaagaattccagagatttgtaccttctttatcagttgaattgtttacagtgtgaatcaagaagttagctcgaccttcttttcttgtgaatggtaagatttcgtgatcatcaatacttgattgtgctgtttgcaacttcaacggtaagatttcctgatcttacagtttaattgcttgtgctgtttgccactt

SEQ ID NO: 26 - DNA, 1575 bp, synthetic construct
  misc_feature 1..1575: note = F420M mutated Beta vulgaris PPO2
  source 1..1575: mol_type = other DNA
atggtaatgctatacgattctcacctctcaggagtctcaactcatcttcaactatcgcaggcatttcccaggaagaacccattaatggccaaagtgtctgagccgggtaaacccacttctgctaaaaggattgctgttgttggtgctggtgttagtggacttgctgccgcatataagctaaagtcccatggcttgagtgtgacattgtttgaagctgatactagagctggaggaaaactcaaaactgttgcaaaggatggtttgatttgggatgagggggcaaatactatgatagagagtgaagcggaggtcacgagtttactcgatgatcttgggcttcgtgagaagcagcagtttccaattgcacaaaacaaaagatacattgcgagagacggtcgtcctgtgctgataccttcgagtcccattgcacttctcaagagcaatatcctttcagcgcaatctaagctacaacttatgttggagccattcctttggagaaaacgctatgcttctaagatttctgatgagcatgctcaggaaagtgtgggtgagttttttgagcgacattttgggaaagagtttgttgattatctaattgatccttttgtcgcgggtacaagtggaggagatcctcagtctctttctatgcgtcatgcatttccagaagtatggaatattgagaacaagtttggctcactaatttccggattaattcaatctaaactgtctccaaagaaggaaaagggtggaggaggaaagccttcttctaatgaaaagacacgcatacgtggttcgttttctttccagggtggaatgcagacacttgttgacacaatatgcaatcagtttggtaaagatgaactcaaactacagtgcaaggtcctttcattgtcctacagtcataaggggatcccttcttcagaaaattgggtcgtgtcttctgtgtcaaaaaattccattgaagatcaacaatatgatgctgtcatcgttaccgctccaatcagcaatattaaagaactgaagattctgaaagctggagttccattttcacttgacttcattccagaggtgagttacctgcccctctctgttatgattactgcgtttaagaagaccagcgttacaagacctcttgagggcttcggagttcttatcccttcgaatgagcaacataatggactgaagactctcggtactctgttttcatctatgatgtttccagatcgtgctttctccgatatgtatctctatactaccatggttggaggaagcagaaatagagaacttgcaaaagcttcaacggatgaattggagcaaatagtttcgtctgatctccaccagctgttgggcactgagggaaaacctacttttgtgaatcatttttactggaacaatgcattccctttatatgggcacaattacgactcagttctgagagcaatagaaaagatggaaagagatcttcctggacttttttacgcaggtaaccataaagatggactctctgtgggaagaactatttcctctggatacaaagctgcggagcttgtgatatcctatctcaactctacttaa

SEQ ID NO: 27 - protein, 524 aa, synthetic construct
  REGION 1..524: note = F420M mutant protein of Beta vulgaris PPO2
MVMLYDSHLSGVSTHLQLSQAFPRKNPLMAKVSEPGKPTSAKRIAVVGAGVSGLAAAYKLKSHGLSVTLFEADTRAGGKLKTVAKDGLIWDEGANTMIESEAEVTSLLDDLGLREKQQFPIAQNKRYIARDGRPVLIPSSPIALLKSNILSAQSKLQLMLEPFLWRKRYASKISDEHAQESVGEFFERHFGKEFVDYLIDPFVAGTSGGDPQSLSMRHAFPEVWNIENKFGSLISGLIQSKLSPKKEKGGGGKPSSNEKTRIRGSFSFQGGMQTLVDTICNQFGKDELKLQCKVLSLSYSHKGIPSSENWVVSSVSKNSIEDQQYDAVIVTAPISNIKELKILKAGVPFSLDFIPEVSYLPLSVMITAFKKTSVTRPLEGFGVLIPSNEQHNGLKTLGTLFSSMMFPDRAFSDMYLYTTMVGGSRNRELAKASTDELEQIVSSDLHQLLGTEGKPTFVNHFYWNNAFPLYGHNYDSVLRAIEKMERDLPGLFYAGNHKDGLSVGRTISSGYKAAELVISYLNST

SEQ ID NO: 28 - DNA, 37009 bp, synthetic construct
  misc_feature 1..37009: note = F420I mutated Beta vulgaris PPO2
  source 1..37009: mol_type = other DNA
tattccatcgaatgtagcaaattgactgtccgttgcaatttcggagtttccactcgtcgcatggtaaatggtaatgctatacgattctcacctctcaggagtctcaactcatcttcaactatcgcaggcatttcccaggaagaacccattaatggccaaagtgtctgagccgggtaaacccagtaagtcaaacattcgaatcacaactcaagcaaatttgtcttgtttgcgttatattttgctcatttcagccttttttgtttttccgacctttgcatactgaatattgtgtgtgtgtgtgtgtggggtttcagcttctgctaaaaggattgctgttgttggtgctggtgttaggtaaattttcgtctcttgcagagtttttgagtcatttgggaattctatgtgaaacttgtaactcccttcagtccaacgaacgcagtacaattttctatcaaatcatggtcctaatttccaattttccatatatattgttggaattatattgggattgtctatcactattaatagtattaggatcaattgtagagaagcacagaaatttttgggatcgaaagaatatctggattgccacattaacagcagatataattcttccaattggtttttggttcttcctaccttgacttgtctggtcaaacattataaactttaacctttaatatccattaaagtaaactataggatttttttgtctaaaacatgcttatataacatgaaatttgtgagaaaccaccttatatatatttttttgcgaaaacaaaccttaaacaaaattattatcgtgagaacaaaccttatgccaatttcgatcattgacccaaggttttggcattgaccgtgtcatgaattttgttgggtttaaaaagtcatgtgtcttgcatacgaaatggtaaatgcgggaaccttgggtcaatgtttggaatccgcataaggtttgttctcccaaaaaatgtttttgttcaaggtttgtttttgcaaaaaaacttatataaggtgctttctcagaaatttcatgttttataaagtagtatttgacaaaaaaccctaaaatatattatagaattattattgactaaattgtgtaaaaatgtactcttctaaaagtacattatagtattttagtggaacatttgcgagaaactactttataaatacgatttttgcgagaaatttcctaataaaaaaatgtgaagtgcaaaactatcttattgataattttctactccctcaaatccaaaatactatgaagtctttcctttctggtttgtcccagattagtttgtacgcttccatctttggtatgatcccacttttattatacttattagttttacgtgagttccttactctatctcttttaacaaaaatactcaactatctctatccaataaaaagttccttactagtcctatcacatctgctttttaataaaataacgtttgataaccacacaacttatatccttaaaatacacgttcaaccaagtgttgagattaatttggacggagggaataaatattttttgaggcatattggtagcagtattcggattccgataggttgactatgtttccaatgttgaccaacacttgccttgcatgtaattctaactttgctcttttttattcttcatttccctcgtattccatatacaatgtttagagacccattccttcctcttctcttctttcccttccttactatgctttgccataatcttcctcaaatgagtgcaaattaatttgtcgttgatgtaggccaactgattgtagcacatcttcatagttcatacctcaacacactcgtaattatattataccctacatgttaaatggctcatgaagctttattttatatcatacttcctccgtttcacaataagtgtaacacttttcttatttggaataatcacaataagtgaaaccaagctccaaatggtaagaaaagttcactcttattacaaatataccaccaaaaagtaagaggggatcacaacttcaatacttcttcactctactttattgtggtcccaactttctctctctaaattccttggtaactccccactttctctatgtttcacttatggtgaaatggaggaagtattttgtagtggtatttagctactaggccttggatgatatacaatcatacaatgtatttatattcacgataatttgctgcccaccttgattaccatgatttccaccaattttatcaatttcagtacttcaccaccccgaatttatattttttatttccaaccttggtatctccatttgtctgagtgcccgatccatttgtatcgcctccagaattgaagaagcttcctgcagctagacaattaggaaggttaaaaaagtttggagatggtggaggatagccataataatcattgttgggaggtggaacttggaaggttattgtagggttgaagtccttgatgaagaagaattgagttcaaatgagaggaaaaaggagcagggaagagggacaataagaaaaaaaagggtaaactaaaatcacgtgtaaggcatgtgcagatcaacatcagaaagcatagtcaacctactggtattagggcactgatacctttttgggtcaaaatttttttacaaggtatttcatgaggtagttttgtccatttttttttttacaaggtatcgtctcattttttttttatcatttagtttctcgcaataagtgtatttcatgaggtagttttttccaaaatttcctcatttattataaaatacctcatcttttccataaataatgcaatgtctagacttttacgctgtttacacatgctcctttgaccatctattgacacacaaggaaaaatagagtagagtcatgcaggatcttgttagatttttctcgatatatactttcaaaagatcaatttttttataattttttttttgaggggattttttttttataattatgtacttatcaaaggtcaaagttgtgcaccgggaagcataaaactctatgtgttgcaatttacatggaaggggaggagtataataagagaaaattatggtaaaaggttcattcctggagatcatgagaaaggaagtagaaagaacaaaaaagaacaatgggagtgcttttcaatgtttgttgtacgtagcatttattcatttgctataatgttttgtgacattgtagtggacttgctgccgcatataagctaaagtcccatggcttgagtgtgacattgtttgaagctgatactagagctggaggaaaactcaaaactgttgcaaaggatggtttgatttgggatgagggggcaaatactatggtaatgtttttgattattgcaggtcttgcactttagcgcacaattaatttctggatttttttttgtactgtggtggttatggtcatcaacatgtctcacccactgtgcttgcagatagagagtgaagcggaggtcacgagtttactcgatgatcttgggcttcgtgagaagcagcagtttgtaagtctttcattatctgaatggcacatactttatttcgaaagattgtaattgccttttctttctagatggcttcatcttcatgttgctttctgattcagtttcgtggctaactttccaagtttgtctgattgctaactctgtcatagccaattgcacaaaacaaaagatacattgcgagagacggtcgtcctgtgctggtaagtttgcttgttttacttttgacctcttttaagatctttcaactctggagcctggaaacatggtgatgcaggaggcaagttctctctattttacatcctttcttctctgtatcttatgacatttgcctcttattctgtgcagataccttcgagtcccattgcacttctcaagagcaatatcctttcagcgcaatctaaggtcgttttatgttaagacatacttgatgctgagagtttattgaattcttaaccttcttcttattttttttttatttttttagcaaaaggtaagtatattgcatttaccaaaaaacagtatgtacaccaccacagcagccatgtcagaatctagaaataccaccgaaaaaatcctacacccaaccagagacagttatattatatcctactcctaagtttctgtacccaatttacatcaatattggtccatttacaagatatttttataattcacagaagcacatcagttttaattagtttaataatgacctctggatgaataaccaactcagaccatatagccttattcctggctttccggaagttgtacgccagagcagcaagcacagcaatgcaaacctgtttcttatacctccttttatgtgtcttagcccatctcttatagctagtgaagatacagtcgtgtgcacaggattgaaccccaatccaactagcgaaagcctcacaacattatgactataaatacatctgaagtataaatgctgcacctttttctcctcttgcctgcacggtatcagaacaaatcccagctttagctaacaattccctggttttcagtttattcaatgccatcatgcaagcaatgaaagaatgttttggaacattcagtttgttccaaacacagtgagagcaagggacctttcctgcagttccacttagccacttatatccctgactaatagtatgactctttgcaccgtaaattgatttcaacttaactttttcataagcagtgaattgtgtgttgttagagtgtctagctgtctaggagattgggagaaaaggagggaccaaggagatagaaacacacctttgtgtttctttgtgtatttactttttagggtgggtcacgttttctgagaaatttgggaaaaggaagaaatagtaacacactttcccatttgtataacctgtatactggagctccaatataatttgcatttttttttgagctgcaagaatatgttgacaaacagttattgcttcttcctcagctacaacttatgttggagccattcctttggagaaaacgctatgcttctaagatttctgatgagcatgctcaggaaaggtaatgtcaagacatgtgttacctcgccttaattttcgttccaggaggtgagcatgcatttagaactaaaaggcacaaagactgttggtggtcttgcctgttcaaatataatggagaggagttttcgctacatttaccctctcttgaagtggggttgaaatatagcatcaagttgaatgcttgattaagtttaaaggacttgtgtaactctttttctgtttactgtgattacatgacctggttgattaacataatggtctgtttatctgtagtgtgggtgagttttttgagcgacattttgggaaagaggtaatggtttaccatagtatttctgctttagtggtaaattgtaatgttgctgataattatacttcgctgcagtttgttgattatctaattgatccttttgtcgcgggtacaagtggaggagatcctcagtctctttctgtaagtgaacattttgtgcttcactcccaattttttggaggctggaaatagattcttttccagttgttctgtcaaaaatagatgtagctttattttgaatttgaagttcccaattgttcattttgactattactgattattgctaagagtggcattatgctattatgctcctaaaagaaaggtgaattttgacctacatatagtataatgtatcaatattggtttaattgtttgttcttttgttccttttggtgctcatcttgcgccttgttctcatcgctcgttttttcatgttgcacttgatttaaatttgctcagcttaacttgtctttttgaatttatattacttattgctatattttactaatttcgttgaaactaattttttgctgaacttttcgttttgttgaaatcatttttctgaattaacttgattttcctgaatagaattgaattttggtgatcttaccttttctgcagccttttatttctttcttgtcctttttccaatctcatttttttatatttccattgtgttgacatcttatcattaactgtgcagatgcgtcatgcatttccagaagtatggaatattgagaacaagtatggaccataagacgtttattttaatcgacatgtatgtttcttagtttatacatatattaattctgtggtaaaaaaaccgaacaagaatatctttttttttttctatcatcaaaaagggtgaatatatgtagaggaaaaagatttgaatcaagatattagcctaaagcaataataatgttagtaatagctttaataacaaattcaaaacgtacattaatgaaccgagaggccggaaaatagttaaagtgaccactaagagaagcgaaggattcatgatgggttttcaacccagtagggcaaatttgttcaatgttctttacaaatcaagcttattaccttgtgggtgtttttgctagagatgaatgatagaattttccctagttggaagtcttttttggttactttatgggagctagtgatgtaatttgtttcgccttatggcatttcctaacatgtgcttttgtgatgtattgaagctttttttttgccttaatttatgctggattttaattttgttctttgtttcatttttcttgcttttgaaaaaaatatatagatatgtatatattaggattggtcgaggattttgagggaagggaaagacctaagaaaacttggatgagggtgattgatagtgatatgagtctatttgggatcgaagaaaatattcctttggataaggtgtagtggagggttgagggagcaaatttatgcagattagcttgacttaaagtttttctttttgattatttttcatttacttgtgttttgcaaacatttactcatgaatgatgtaaacttcttcaaccaaatctctggaaaaaaataatctacatggaaaaaacattattaatgttaacttgacagagatcccatccttgtgaagcagctagcaattaggcatctaacaattgacattttaatggacaggatagaatgtctcttgatagtcaataccctctgtttcattgtatcccatagctactaatctagtttgtatctttccaaagaaccattattttgaagtttcaccttgaacacccattttgaaccaatatgtttcttgcccttggggagaggggctaattgccatgttttgatgcggatgcaaagacacttgttctacctgagcctattgacttgatcatggatactctagggtttgaactcaagggaaagaatcaagtcttggcatgtgtggtgacatggcgtggggatggagtaaagaagagtcatagttctgttaggatatgttcttgcttgctacatagaatcgtagttctgttaggattgctatgatattatatctagtagatagattttatagttaattaggataaacatgtgatgatcatgttataataggcatgtgattagaggataggattagcttaattcttatcttgttgttagtttaattcttatcctagttttatgtttatcttagtcgaagttgtagccatataaagggcgttccattcattaataatacttagttttgctttgtgttttaaacatacttcttgattattgtttgcttgtgagctaactaatcaaaccattaaagacttttcaggagttttagtgctaaacatcttaatttcaggagtgattttaagagcgtttagtgatcttgaatcaagaaatatccttgttcttgttcgactaatatcagtggttttgttcgagttcttggagttaatctcttcaagattcttattcaacttgattgttgagcttattggtttagtaatcatatcaagtggtatcagttttccagggaggagaggatagataggattctctttgatcaacaaagatccaagggctatcaacaaggttcaaacattgctgcttgttcaagacttgatctttttctaccaagatgcattctttacgtcacaaggtagtaataacaagattaagagtggtttttacatccaagaatcaatctttcacgtccaagatttcatctttcacgtctaagattcattctttaagatcaagaaagttataacaagcatagaagaacacataaccatggagtccgagatggacaagcttgccaaagctatgcaagcacttgcaaagtcgcaaactgaatcacagagtcgactcaatgagaatactaccacaatcaatgggattggtagtaacatgaataggttggaggcacgcatggatgccattgcaaccatcatacaaaagaagcttgatcggaatagtgccaacttcataggtgccaattcagaggaagagttggcagaacgtgaagaaagatcatccaagactacatacaatgatgatcgtggcttaaagttggatgactataatggagatagcaatcgagaagacttgttacagtggattcgacaacttgagaaggtatgtgattatagaggctttgatgacaagaaaagattcaggattgcctccataagactcacgaaatatgctggaatttggcttgaaagcttcaaggcacaacgagccaagaaaggtaaagaaaagttgtgtagttggacaaagttgaaagttcaagcttaaagagaagttcttgcctagtgactatgaacaaaaatagttcataagactctctactataagccaagacacgcttagtgtacatgagtacaccatggaatttgacaagctagggcttatatttgacatagaggagaaagaacaatggaagattgcaagatacatcaaaggcttgaaccgccacattgccaagaaggtggaagtatccacttatcacacctttgaggatgtgacaaagttggctaagaagtttgaagaacatgagaaggaagagaagcctaagagttcttacacgcctaagtatgatactaatgctaaggccaaggctagcttcctactcaaagtggtatgaaggacctaagaggctaagaacctcaccccacctaaagaagacacaagagttgagaagcctaaagtcgtcgttccaaaggagaaatttgaagagatgagaaagtgcttcaagtgtcaaggaaggagacacatagcaagcaattgtcctaacaaaagagtcctcaccatgagacaatacctagctttgcaagaagaggaggatgtctattagttcgtccctgatgaagagcaaacttaggggaagaagaggaggaggatgcttttgctgaggatgatgcaaggctagtaggggtcaagaggcgcaccttacatgtcgaccatacacctagcatggagcaaatggaaaaatcttttccacactagatgcaaggtaggtgactatatatgtaatggtataatagatagtggttcttgcactaatgttattgtatctgaggtagtgtcaaagctaaacttagctacaagggcacaccctaagccatacaagttgagtttgctagatgatagcactggcatgagagtaaagaaacaagctttgatttcattctctataggggttataaggatgagttatggggtgatgtattgcctatgagtgcatgtcatctcttgcttggaagaccattgcagtttgataaaaaggtcatccatgagggggactctaatgtgtactctgtgttggttggttctaagagggtatgtttgcatcccttagctcctcattcagtggcgccaaagcaaccacctaagacaccaagttactttctatcttcaagggagttcgaacaagaggtggaggaagaaggttgtgcttatgccttgattgtaagacatgctgccacaagtgtcaagactactagcaatgagaagctcgaagccttgatgaaagagtttgaggatgtctttctagaggaactacgacccttgagaggcatagaacatgctgtagaccttgtacctggcgcccctttgcctaacaagcctgcttataagtgtgatccagtggcatctagggaattgcaacgccaaattgaggacctaattgaaaagggctatttaagggagatcatgagtccatgtgttgtgccagctttactagttcctaagaaagatgacacatggaggatgtgcatagatagtagagcagtgaacaacattacagtcaagtaaaggtttcctatgcctagattggaagatatgttggataagttacatggggcatcaatcttttctaagattgatcttcgaagtggctaccaccaaatgaggatcagagaaggtgatgagtggaaaacaacattcaagaccaagcagggattgtatgagtggatggtgatgccatttgccttatgcaatgcgccaagctctttcatgagcttgatgaatgaggtacttcgtccgttccttaacaagtttgtggttgtttacatagatgatatacatatctatagccaaaatgtggaggaacacttgttgaacttgcgtagcttattcatgaagcttagagagcaccaactctatggtaagattgatggcgacgaggttgacgggggattatggcggcagtgaatcaccctctttgccggtcactgaaatacaacctgaggtatctttaaattctgtaattggattgactaacccaaaaactatgaaattgctgggaaaaattgctggatgtgaagttgtggtgatgattgaccctggggcaacccataattttttatcactagctactgttgagaaattagctattcctgtgtcggaatcggaaggatttggggtttctctaggggatggacaggcggtgaggggtagtggaatttgtagaggggtgttattgagtttaaatggtggagttgaagtggaaacagattttcagcctctgggtcttggtaattcggacgtgattttgggtgtacagtggctggagacgttggggacagtggagagcaattggaaaacacaaacaatggggtttgaaatcgagggtgtcaagttcactttgaaggtgacccatcactggcgaggtctcgaatctcactcaaagccatgatacgtaccttatgtaaagagggtggaggtttgtggcttgagttgaaccagattgagcattatcaggagaaaacaccgcattcatcagccttacctgaaattccagttttcttacagagagtccttacccaatttcagtctgtgtttgctacaccagaaggcttaccaccgataagagaacatgaacatgcaatagttcttagagaagggtgtaatccggtaggggtaataccgtaccgttatccacagttccaaaaagatgagatagagcgcctcatcaaagaaatgttggcttccggaatcatcaatccttccacgagccctttctcgagcccggtgatattagtgaagaagaaagatgggtcgtggcggttttgtgtagactatcgggccctcaataaagaaacggtccccgataagtatcccattcccgtgattgatgaattgttggatgagcttcatggggcaacacttttttcaaaactcgacttaagggccgggtatcaccagatccgggttaaggccgaagacactctcaaaacagcttttcgcactcatgaggggcattacgagtttttagtaatgccatttgggttgacaaacgcgccggcaacgtttcaatcccttatgaacgaggtcttcaaaccattcttgcgcaagtttgtcttggtatttttcgacgatatattggtctacagtagttctgccaggaacatgaggagcatttgaccttggtgttgcacaccctagcagctcataaattgtttgtgaatcagaagaaatgtgattttggcaggtcggaagtagcatatatggggcatatcatctctggtcaaggggtggctgtggatatggagaaggttcaagcgatggtggaatggccccttcctaaaaacctccgggaattacggggatttttgggccttacagggtactaccgcaaattcgtacttcactatgctcatatagccaagcctttaactgatcaactcaagagagatgcgtttgggtggtctgaggcagcaactcaagcctttgaaaagctcaagaaggcgatgatcacatcccctgttttggcaatgccggacttccaagagttgtttgtggttgagaccgacgcatccgggtatggtctgggggcagtgttaatgcaaaacaaccgacccattgccttttacagtaagttgttaggtgcccgggctcaattaaagtcgatctacgaaatggagttgatggccatctgcatggcagttcagaattggagatattatctgctgggtcgacatttcctcattcgtacagaccaacagagtttacgtcatctcactcagcagcgagaagtaagtactgccttccaacgttggatgagtaaacttatggggttcgattttgaaatacagtttaagccggggtgtgccaaccgggtagctgatgcattatcccgcaagacagtgggagaggttgaattgggtgcgctgatattaactcatggggtggactggaccgacttggagcgtgaaattgaaggcgatcctctgttgtgcaaaattaaacaagacttccacgggggtgctattactcctgtgcacttttctttggtggacaacaagctgttgttcaagggtcgatacgtgattcccagctcttcggtttttattcctaccttgctgcgagaatatcacgattctcccattggagggcattcgggggacctcaaaacatatctcaggatggctgccgactggtattggaggggcatgcgcaaggatgtggcgcggtatgtgcaacattgtagcgtgtgtcaacaacaaaaaatgtctcaacagatgccagggggggtactacaaccactccccataccttcctcggtttgggatgacttgtcaatggacttcgtggaaggcttgccatcttccaagggggtaaacaccatcctcgtggtggtcgatcgtttgtctaagtacgcccacttcctcccactacgtcatccatttactgctgtgtcggtggcaaatgtgtttgtcaaagaggtggttcgtttgcatgggtttccttcctccattgtttcagatcgggatcgaatttttatgagtgtgttttggcgggaattatttcgtttacatgacaccacactcaaacgaagtaccgcgtatcatcctcaaacggatggtcagtccgaaatcgtcaatcgagctctggagacttatttgcgttgctttgtgggggaatacccgcgctcttgggctcagtggcttgggccgaattttcatataatacttctcctcatctctctaccaaaatgaccccgtcaaggtcctttatggtagagaccctcctactgtgatacgggttaatcggggagcctcacctgttgaaagcttggaaaacatgctccaagagcgagacgcagtattagatgccttgcagattaatctgattaaagctcaacagaaaatgaagagtagtgctgatgctacaagaagagaggtgcattttaaggtgggagatcgagtgtacttaaaattacagccttaccgtcagaaatctttggcttaacgcccttatgagaagttagccgcccgtttctacggaccatttactattttacagaagattgggcaagctgcatacaagttacaacttcctgtttctagcaaggtgcatccggtgtttcatgtctcccaactgaaacaggccgttggttccattcccgtttcagccactattccagagcaattgtcttctgacttggagttagaggtggaacctgatgaactcctcgatgttcgtagtgtttctagaggccagcacacttacttggaagctctcattcagtggcagggattaccatcattcgaagctacctgggaagatgtggctgctttccatcaccattttccatccttccaccttgaggacaaggtgaaactttgggggggtggtaatgtgatgcaccaaactaccactccactactcacctattagaggcgtaagaaaaagggggtaaatcaggaatagtttacaaattctgttgaaaggaatattttgtaattatgatgtcagaggttgttagcaaaaaggcagtagagtaacaataaaaaggggaagggaggagagaagaaggtattgagatttttgtaaggaacttggcccttgggagagttgggagcctctcgaaagctcaccattatcttgtgaatattttccttcctggttatatacaagaaccttcctctgtcaatttcttttctctctaatcttatttcttattctgttttctggttgccattgtttgaagttgcttgttgtgcttgagtaaatacgtgaagtggtgaaacccatctgaattcatcacatctattccaagtggtataatacaagcttgtaatccaaatctaatgagaaatctaagttatgaagaatttcaaaagaactaagtacccttgttttggatgcccaaggatttacttgccgctcaagttaatgctcaacgtgcaagatacaacctctttagtatcccaaggtagtttccataagaattaattgagctcaaatcaagaacaatatttttatgtattaatgtgaacacttcctgaattatattagatatatggtctgaaggttggaagaaagattagcttttaattttaagtttgagatagtttttagaatcgaggaaagattagctcttaacttgtaaactaaggattgctttataagtaaaacattagttatggaactcttaaaattggttttgaacatttctagttaaaaatcccatgtaattctcccaaactagcttaaaatctcacatttcacaagctaaggagagacaaatggcgttctcttgtgaaacaatctaaaattttcattaggctactgttttcaagtatttatatgttagaagtgccgcatataggtacataaaataagtttacaaacacaagtaggaataaggaaaactaaaagagaaacttcagccatacaaaaccggctgaaatcagctactactttctactttctagcttcaaaatctgattgcaagtctcctttaagccaatcaccaatgaaaacctttcctccacatgaagtgtgctcaaatcaagagaagaaacccatcattcgcctatagctacctgggtcagatgaagatacggcaaaaaaaacgctggaaatcagtgaaccaaaataagcaccaattggatgctttctgtccttgctacattttcttctcataggactacttcaagccatacatgaataagcagttagatccagctcctagcatccatttgatcgtacaaatgagctccaaaaagataagtaaaaccaagcagccaaaacctaattaatactaatgatgaattagttgaatagctaatgacgatgaagcaacactttagtaggaatagtgttaattatgatcaatgctacttaatcttctgattaatttttggaaaaatgtcatatctaccttctgtatacacttattcataactatatcgtattattattatttttaaataactaccttttaagtaccaaaacctaagaaatcaggcacttgatggattccatccaaagatccatttggcggggcccactaactgacttttgattttttgcctttcctcttttggttaatctcaatggttcatcaataacaactcaatcttctccccatttcatcaaatcatccctaaatcagaactttttcaaattcacccaaatgaggttatggaaacctctaccaagtttattcgaccacttttagtctagctcaaagttttacacttgcttcaaaaactaagatttattaactttagaaattaggtttttatttttattttttatttaactttgtaacaatcttaaataactcaggtgctttctagagtttggctttaattgtttttcccttggttatgtgaaagaagtatgactactttctccaagactaaagtagagagcaaaaaatgcaattctggaatttcttgcaaaagaaaaggaacgagttaatgataatgaaaaacaaagaaaatgatgagaagagaggagctgaatcaatcatgatcatgtattttaaagttttttttgctattgaagtgacttaagaagaggaaagaggatgagtgaagacaaacaaaagaaaggataaatagagggaaatcttgggcttagaaaggtgaaaaggtaagaagatgagttagtgggccccaacaaatgtatctttggatataatccgtcatgccactgtttggggcttgcttaagtccatacattacttcactaattttacaaaatttattttcttgaccaagaactgaaaaaaccttcagtggtgatctattaggttttggaagttaaaaggtagttatttaaatgtttttaatataaaaggtagttatttagatatttttaatataaaaggtagttatgtgaataaaagtgtatataaaatgtaattttttgacatttttgccttagtttttcttgctaattcaccttttcaacttgaccaagttgctatgaggagaaaacgagcaattattaagcaaatcgcaacactagcattaatccatggcccatgaaactctccataattagagattggattagcacttagtagaacttcttgctcctgctccaggtttccattacttctttatctaagtgcatcaaaaggttgttgggttatgaaaggtggtggttgtgtatagtcattgtcaaaatgttgttaatgcactctatttagaggatgagggattgaatagttttcacctcgtgacctttcattcctttttaaaaaaattgataatgtgtattggtcctatgactgtatgaatggtaataagctatctcatgagctgttactatcttcctcagagtctaggtagaagggtttgggctgataattttctactatgtgcaattagtttgttggatttggatatgctagttgatataggtcctttcccttgggccttctcttaatataggcctacagtgtgattgaagataaatcttctggagaatataagaacaatgagatggattggttagaggttgatttgttcttttggtgtaagactatttcgggttctctattggttatgttcagacgccagaatatgtgttggtgattgttttccatgaacatactttatccgcagagacatttttcttttttcttcctataagattatatttgtttcctctcttggtgctcatctcagtgtctctactttacgttaaactgttgacattacttgacaatgcgtatatttgtcgcatggtgctcttccctcactccacgtcgaccccatacatcaaaaaatgccattaaagaatattcgaactcacaaccttgtgttgaaagaatggaatccctaccaatgactcattaattcattttctctttaagaaataaatgatttcctcacaaacttttaggctttaagagcccaaaagataaaaacataaaataagatagacatcaacgtcaagattagccttaaatgcacaaagcacatgtcaaatgattgataactactcacgagttgcaactctttgggcgttgcctaatattaattggatctcttttaaaaattgttggtggttatggttggtggagaggaccatgtaacttttagctggtcacaactggtaatgattgtcacttttactgcccataaaaaaatttaaactgttgaatatgtttctggcagtggatctgacaaatcctttacaagttggcgtccattttgttttgccatgtgactcaattataatacgtgagttttattatccaccaggtttggctcactaatttccggattaattcaatctaaactgtctccaaagaaggaaaagggtggaggaggaaagccttcttctaatgaaaagacacgcatacgtggttcgttttctttccagggtggaatgcaggtattagcatgtagctttcattctgttaacatttgtggttcttccagacatacatccaatgctttttttttttcttgctataaccataaacattcttgtcatgaacattctttaatactgttgctgagcttagtgtattcgttcattcatgtaatttcctctcttgaggttaaaatggcatacagccttacaacctatatccataatgctccttagagtagaatccctaggttataacatagtaccacttatcaaaataaacatggcacacactgcaggacaagaagtaaatccacctagagaactgagcacctagtagtaaaagcagcgatacattactaataacagtagcagggccataagagtagtaaatgggcctcatttcaacactccccccgtaatggtgagagagaagaagcagtctgaactcccagcttggagagcaaaatagagtgttgctgaacagggagaaccttagtgaaaacatctggcacttgatcttgagatggaacataggtaggctgaataaccccttcttcatttgtattgtccctcaggaaatgacaatctatgtctacatgcttggttttctcatgatgaactagatatgctgctatggcaagagcagcttggttatcacagtagataggagtagcactggactttttaatgcgaagatctttgaggagttgtttgatccacatcacctcacacacagcaagagccatggatctgtactctgcactgaccacaagaaattgcctctttgactttcaagatacggggggagtcaccaaggagcacacaaaaccagatgtagaatttacaacacccatcccattcactatcacaaaatgctgttagttgagcactagacttgttcgccatgagaattcaccctgttggcagcttgaagatgcacattagtggggcagtgcataaatttgcttaaatcatgtatagtgaaggcaatatcaggcattgccttgtaatagtgagataaatgagcttccccatcaatttttgatacacatcaggttgttgaagaggatcaccattgtcagcatagagcttgacatgtgagtccatacgaagcctcaatcgtctgcaatttataaaaccatattcatcaacaagacccatcacatacttctttagagataaaaacgatacttcactacactgatccacttcaatcctcaaaaaatatcttaggccacccatatctttcatgtgaaattggccagcgaagaaactctttgcttcctcaatagttgctaaactattgccagcaagaatgaggtcgtccacatacaccaatatagcactgaaacagtgagagttttgcttgaagaatagagagtagtcacacttggattaagtgaatacattttgctttaaagcagtgttagcttggcaaaccattgcctcaaagcctacttcaagccataaagtgacttaagcagcttgcacaccttagttcatttggtgtcacttctgccatcagtacttagctccccctctccttgaactttgatcctgttacatgtttcactatatcctggtgatagcttcatgtatacactatcctacaattcaccatgcaaaaaagcatttttaacatccatttgtttgcaagaaccaaccctctaaggatgcaacaacaagcatgtggtcatctttgctacaggggtaaaagtctgctcataatctattccatatctctgtctgtcacccatgattacaagccttggcttatgcctattatttgtgccatcagtgctgtattttgttctgatccatccatgtgagggatggctcatttctacaaaatcctagttccgttaggatttgtgttgttttcctaattctagtaggaataggactcctaaaatcctaatcctcctagttctgttaggagtttaaaagttttagtttgattgtaattctagttgtgttagaaatccaaatcctagattcatgtcacgtatggttagaacatggctagtaggataatttgtcttgtgatgtccatagccttggcatttgtggcacctaactttcaatagcttgtcttctgtctccttttctttctccttctttgaggaatcaacgtttttagagctatctaaaccactagcatcaatattaggtttaaaagtgctaaaagatttcgaatagttcttacttgcatacaatttctttttctagtttatgtagcgtcaccagggaacaaaaactcggccgttccgttctggaacggccgctttgtaacggatttcagagaggccgttccgttaaataccgttctagaacggtgatttggaattcacaccaaactcggcgcgatagcgttacgtaacggtgtaacggcgttccagaaccgttacaatcacataacgtccgttatttgaagaagaccagttcttttggtggaggaagaagaagagccaacgcaagatctatagatctgagttaaaatttgaaaataaaacatgtttttttatttaaattaaagcttacagaggatgtagaactcaaattcgagtaaacccctcctttaatttcattaggttactgcaaatcgaaccctaaattgcaaaccctaatttcgaaaaaaccctaatatgcattgggatgcaacgctgcttctccggtcatggcagagaaggtcgacgagtcatcttcggctgcttttagcactgtagctgccggtggttggcttgtttgcaggttagtgcttgctggttttctttctctcataccgatcatcttcttcttttctctcttctctttttcttttttattgtgtgactgccagtcacgtgataattgcaactcataaagtatctctttctctctcttcttttcatccctttttatttttctttcccttttagtttttattccctcacgtggaatcacctaattttcatccttttttatttttttagttacactcttacacagaagtatgttcaaatatcattatagtacctcaaatattgtatttataagagttttggacataatatgatatagaaagtaaaatagaagaaaaataaagtttaaatgtcacttgtgtgatttttttaaaaaaattcacgccgcgacggccgcgaaacgttctatttcccgttacaagccgttcccgcgataacgcgaccgttcccgcgaacgcgaccgcgaccgcgttttttttccttgagcgtcacatcttgcaagcttcttcaaaggtgagttatgtgtacaactccaatttctctccaatcccctccgtcctcatttaggcctccaaggaagctacttaaacattgatcttcaagttcatcaattttccaaagaatggataacttctcgaactcctttatgtaatcttcaacggacatattcccttgtttaagagtagaccattccatgtacaagctttgtttgtagttagaaggaacaaaacgtcctcttaacaactttttaagcttatcccaagtagagattttgggtttattagctttcacacgctgcctctttactccatccaaccaaatagatgcatatttggttaccttaagcacggccaccttgtatttcttttcttttggtgtctcttaatcccaagtagagcttttgcgtgtgaaagctaataaacacaaaatctctacttgggataatcttcttcttgtttccgaaacaactaattcttatggtagttaggaaagcaagaatggtttctaattcaatagggaatatattaattattattagtttaagttaaatagtgcacgaatctaaatagattattcgtctcaaaatctcacttaagtatagatttgtttggacatctgagggaagaagaagagagcgagataaaggagaattatcactcaatgaatccatatcccgagttttcccatttacttctttgaaagcaatatagttcacgaggtcttattatcagtctatggacataagagtaataatttaagggcaaaaactatgactttatgggtttaaactgatacatgttctgttaaactgatagatgttctgtgttaaaccgatactcatatattcctggttaaactgatagatatatgatttaaattgatacccgtctcagtcatgtcttggattgagacggtctgacacaagactttttgtgtattatatatctgattagaataaatttatcctgtttactaattattttatcttctccagacacttgttgacacaatatgcaatcagtttggtaaagatgaactcaaactacagtgcaaggtcctttcattgtcctacagtcataaggggatcccttcttcagaaaattgggtcgtgtcttctgtgtcaaaaaattccattgaagatcaacaatatgatgctgtcatcgttaccgtgagttttactttgcttactgctattgcaccaatctttcttcttttgacacactgataatggcaatgctgttgtggtttgaagccatgttatggggttttagggatatttatggagtctgatctaatatgttattggataaaattcagatctgtaacgtgactcaatgagattgaaaaaaattgaatcaagataatggattggaaaattaggagctaacctagggtctataagcgatccacttggagtctcataccaagcaggtattcgacattttaggtttatattgctgctatggctcatatgggagcctacatagggtctggtgcttattcctttttcttttgtctagttttggggctgcacatttctgttgtgttttgatatggatagccatcacctgcaattgcatggaggctgaactaagttctataggggagcaaacagtatctgttggaaatttattttcatattgtgtttttaaatgctataatccaaaatttgttgttcccctaaaatgcctaaaatacccttatgtaactgctccatctgtcccttaatagacttcccatttctccaatgcatgtttgccaatacacattttgtattgttaatatcaaaaattacatattagtaaaaattataaaagtttgattttcctaatgtacgcaatgagacgaatcaaacaagacgccatatgactatgttttttcttatacttcctatgttttttaataagtgacatgttttccttttagggaaatgtcacaataagtgacacatagctcaaagtagtaaaaatacttctcatttattacatctttgccattatttaattgtttcacctacctactttatccaatactcaaatttgattggttgaacaattggtcccaactttctctagactccttggtattccctttcccccactttctctctgtgtcacttattaaaaaatggaggacgtatattggaaaaaaattggaaggttttcttcacttatgaatagtggtaaaattagagatgggaaggctattttgggatggatggagtaatatttaaatttttaaaataatgtcattgttttagtgatgaaataaaattcaaggctattttttctagtaattatgttatctgtacatcaccacacgtatcgcgtgcatataagactagtttgatgatattccaacactgttcgaaggaagtcaggcatggaaccatgtttgcttccatatgggaaatattttgcttactctccttcaaacatctacctcattatcccagaatgattgatcgaatctaatacaaatatacaattgatcatatgccaccagggaattacatcaaattaaatttttatagaaggggaatcagtcatagcctcatagggaacgaataagtgatactcgccagtttctttcctggttacttttcctcttctcactagccatcctttatgtatgggtatgctgcatcattcctgccactggttgggactcccgtttgaactatggggggatgggaaagctaagccatcatcttcaaattgagtttcttgagaatgtaagacaccatctgtaagatgaatatagtgcactctatagtcaatgtcatgatctttatgggtttatctgctgaaataactgtgatatacccagctctccatttacaaagttttcctacatattaaactcttgcccgcaattctagaacttcattgtagaacttttcctacataagcatcatttgtcttttctgtagtaaaagttagaaagagctttattttagaacattcgtttttagttttctttgttgttgattactccgccacttttaatacttttatgattcaagtatttgacaaaatcatgtaatttaggtcctctgctgcatgcagtctataccctctctctctctctctctctctctctctctgtggttgtgtcttacttgttgagttactaactccagccattacataaagtaggctggcattatgatgagcaaattactcaagaccacatgttagctcctttttcttttctccttattctgaaaggcaaatataggtccatcttggtgcttctcatgtcataagtaagctgaccccctccttttccagggaataggacaataatccaaaagtgagggttttacatgttgggatttgtgaagtttcttattttacttaatagccgagtcagtgttacaatacatagtaccgtgttacaaaatagtatgtaacaccaagcatgtttatgtgcaaaattgtgcaagactttgttgctggcacgccaagggctgttttaatgtagtttacttattcttttaggtttttcagatgacaatcataaagggaattaggagtgtttttattgtagtcaatccctattgtgctacaacgataaaagaaaaaagcacaagactagaaggagaagtaatgtctaggaaagactcctcacctggggttgctagtcacctacacatcttagaaggcatcaaaccaaagcttattcccctcgactgttttcgggagaaaagaagacaaaattgtttctaacttatactttaccagtttcactacagcatcagaaagaagcaaaatatgctcccacaacacggcgaacctagctttccagatgtgataaaccagaccagcaaaatgattattttcactagagctttgagtctattttttcggtttttccccttcttcctggtaatgtcacgccaccaagccatcatctcaattttttgagatttgacgtaatcgctcaaatagctgagtaagacacttcttgctctaaatactaataaaaaagaggtgaatgtgggtctcagccatgttactcaaatcggataaagtgtctactcttattagggtttttgggtgttggactcatccatttttttttgtaaaatgtcaagattttggtttgaaatgagagattcaagtgtcgtgacatgagtcggcacgcaacacttaaacgtgtcgaagtaacagagggtctcagacaatcaactttaatcaatcacgaaccccaaaatttatgcaacctttgctcatattcagtctctgtaaagcactcaactgcagcacacccacccattcgcttcacctacagcaggagggcacccaagtaattgctatgatgagcgaattattctgttttgccttgctggaatattgctgttagatttgctgactcactggcagttaattatagtcagagaatgagaaatatcctgtagagagagaaagggtatcttttgtatttagctctataaatagctaaggaagggaagggcattgagagtttatgatattataataggagagatttagcctctcgaatgctgataggagcgtagctcttgttggattatcaatactactctgtttgctctatctatttctactcaggttccttcttgtacagtggatccctgattggatttacttcatcaaccagcagataaaattatttgtaggcacattgaaaccattccaaacctaatgaggccaaagtttatcacaaagaatataggagccaaatgtaggcaacagataagagtataattgccagaagttgaagactccaggtattgttcagaaaccttaatgcatatcatcattctgacactagattttccccggagccaactaacaaaaatgaattaaagagattaaggctatgtttagttcacctgaaattttctgatctgaacttatctgatctgatctgaacttattttttctgatctgatctgatctgatctgaaccaatctgattacaagatcttatcttttagatttttctcaatatataagaaaaaatatagtcatgtggggtcttgtttgattcgtctcaatgagtactttattaatattcaattattataatttttactaatatgtaatgaaagatataatgatttttaaatataagcatgatctgaactgatctgatgtgaacttattttttctgatctgatctgatctgattagatctgaaataagcaaaaataaggtgaactgaacatagcctaagcaacaattgagggaaaataagatcattatggctaagataagataaatatgtaatgataaaatcagagtaattatatcagttacactctcaacattcgtcagattgaggtttcctcccaaaatgccaacccacttttctgtattttcacgtccttctctctacccttctaggtatatattacatcagctgtaaaatttttgaaccaactagtagaatactgatctaccctcaactgcctcactttctcattttttctgggcctttttctctctagcacaagtccacataagtgatgcatagcagaaatataattccactagtcatcctcaatattgatataacaaacacatcacccacatattatcatttttaatcgctgcatgcgaggcatacttacccaccaatcaggatatgcataacagcgttcctaattccaaaaccaccatatatcttgggtttgcaactctcatccctagcaacaaggggactttctgaaaaagtggcagattccgcccacaagtagtttgtacggacacctttattatattattaatatcatatttcggcaacacaaattaccagcccagtaaaacatgaattgacatgagactaacaaggggcccaatctaatatcgtacgtctgtactaagcaatgtataaaaaaaagctcaaggtgcattgatgcaatagggatcctaatgtgcataggtgcgcctcattgaagtgaggcaccactaaggataaataaaaaagattgatgtaaaattaaattgtgcaccttgggtgcgcctcgatgaactttttttgtgtgcctaagtgtacctcaagtacgcctcattgatatcgcctcgcctggcagaaaacgagcttgaccccaatcgccttgctccccaccgcctaggcgtgcctcagtcacactttttaaatacattggtattaagtactcagaatggcaaaaagaaactttgggcattaattagacatttcactttttgtgcaactatttgtgacttcagagattgatatgttttctacattacagacttttgtgatggctgcatggtctccactgtcaaagaacattagtttaagtagaagaaatattgctctattaccttcctccctctacaaacaaaatcctaaaatgtggttatgtagtgccaattcaaacttgtagatgcatgactaatgctttcattatgctgtgggtttttatactatgattcatgtccaattacataacaattagctggagtcaggatatgtcacggaaattttaagcctggcaggatgattgtttatattttctctttttcggtgtttaagtcaaagtaaacttctaggctgctcttttataggctagttgggctgttggggagatctacacattaagtgtgaagaaatcttgtctaactccagtttggttgagaactgtaagctgtcataacatttgttgcatgatgaggccttgtgggattatcatgttagctgtaaactctaaacttacttgaaatctagtgttgtgtctccttatttctgtagtcaaaattgaaccttctgtacgtttttgatacctgcgactagaatgatggaattctgaattactgatactattacaaccatctgctaagaacgaagatgactcttagctaatttctcagcagatttagagaaattaagaagaattactaatgaatatttaaagagaaaactaccaagatatgattgtattgatgaaaaacaccaattacaacctaaccaacattcgagaggttggagctctcccaagtaaccatttctctcactaaacttatcaattttcaagatgccttttccattctcagttcctctatatttatactactccccttagcaaactacccaacttattccccaagtaaactaaagagataatatctaaaatacccttccccctacaataatattagttcttagcattaccggccccctaaacttccaccttgtcctcaaggtgggtcgtaatcatcactaaattctgggcctctactcgtatattcagtgtcttgcagcccttcaggccccaagcctaggttatgcagctcgtgttgcggctcctcctcatatagttctctggctggagtgagtgcctcaactataatgaaaaagtcctggaggtggggaaggaaggagtgtctgaaatggtgtggtgtgctgctggtgttatgggcttgtgcctgaaagttttgggtttaaagagatggagtggagaagagtggagaagtgactggagacgtaaaagaaggaatcataatttttgtaagtggtgggttgaaaaagttggtgggaagaattgtttttataaaatgtagtgtaatggtcgaaaaatgggtggagtaagtatggtttttggctggggatgtggtactgggttgaaaataaataggtctgagcttacttgtaaaattggcctcaacatgagcaggcccaatatcttgagccaattccccaaaagctggcaatagagcactcttaattgcattgttgtgggccatcgggctccaaacatatattcggaggagccggacttctttggtgatgtcattagcttggcccattgcacactttcccttaacagcctcaagatcttttcccacttttgtaccccaaccacgtggcttcaccatcctttctttcttgcttttgtcacttttttggcaatatacgagtttgtccttactaccctcatcttctaatgttggcttcctcaccaagcttaatttctggaattttgtccaccaaatcccaccacccatcgtcaacaccatacctatctacaccggccaagaagcctggtcctccacccgaattttcgccacagacaaagcctgaacaaccgtcagttctctcaccggagaagttcacaggtccaccacctgacccactagttgctgatccacccttcacaaatctccctcctctggctgccacaagtagtggttcctccgtaatactcatatttctcgtccaagagccctggaccaccaccggacccacttccaccggcaccaacttgttcaaatgatacttctctttcttttccaaacagcctacttggactggaaaaaccactgcgattgtagcctccgccagatctgtagcctagtgcacctaacgtgcttccaactgcaacccaatagggatggaaatggatgggattcggggagggtggagcatcacccgcatccgtcacccgcatccattcgctccacccgctccacccgcatccatccatccgtcacccacgggtgaaacgggtgggtcggtgataaacgggtggaaccatttagggggtgtttggtatcatgtttttttacaaaagaaacagaatcaagtaacaaaatccgtttctacttgtttggttctatgttgctcagactcgagtacccatgtccgacacgggtacgtgtccaagtgtccaactcagctattttctagaattttttatattttttaacccaaaacaaagtgtccaagtgtcccacccatgtccgactcccgaggatccgacacgggtacttgaggtgaaatgaagagtccgagcaacggaggtttggttagtgtgtaaagtaacaattaccgttacttgaggaaaacacatccccccaagttgtttccattcaaaaacctaaggaaacaaataacgtttcactcctcaaacaagaggaaagggaatgggttatatttatttccattccattaggataccaaacaactaataagggtaacacttattattatcctttcccctccttatcaaaatcctttccattccgtttacggtattcataccaaacacccccttagtatattttctaatgaaatttgtgatatgatatgcatgatataaaataattctatcaaaaatataaaaagtaagtaaacttacatgtacaacttaatagatgggtgatgggttggaggttaaacgagtgatggatcgggtgacgggtgaagaaattctcacccaccactcgctttccatccatttaaattaggtttttcatccatttaaaaaaccgggttaaacaggtgatgtatgatccatcacccatttccatcctcaaacacatcccgatttgtttactgcaccaccagatccaccagtataaccacccgaaaaatcatcatgccttctactagccttgtaacctgctcccggtgagaagcttcttccacaagtggtggtcgctggacctccatctccttcttccccaaaaaattttccatgacacccactcgacccttcatctgtgacaacctcttcttcgtccacctctgaagttttggggtcgtcttcctcctcaagctcctcttgaagtaactttaacttccgttggatgggagagaacgcttcattgattatcttcaccagatcttcttgaagtttctcgaaactttttctcacgttttcctctacctctttcgtgatttcctttccgatctccttcatttttagactaggagctcttgcgattccatggcagatttctttttttaaaacaagaaaatcaggcacttaatctcccagaatagtggtgctctgataccattttctaagaaccaagatgactcttagctaatttctcagcataacaacaaatttagagaaattaagaagaattactaatgaatatttaaagagaaaactactaagatatgattgtattgatgaaaaacaccgattacaacctaaccaagaggttggagctctcccaagtaaccatttctctcactaaacttatcaattttcaagatgccgtttactactccccttagcaaactacccaacttattccccaataaactaaagagataatatctaaaatacccttccccctacaatattagttcttagcaccatcaaactgggatggatggttttgtaaggttccaatttacttctccatcaaaatattttaggattttttatctcatgtattttagagtttcctcgtccctttttatctgataagattcttctgatgatttgattttatggtaggctccaatcagcaatattaaagaactgaagattctgaaagctggagttccattttcacttgacttcattccagaggtttgtatttttatagtggttagacatgcttcccctagttttcaaagtaaaagcatccttgttgtgacgatattttttcccttgtttttgtttttattattatcatcacttatttccattttctattttccatgctgataagatgttcatcaccataatcttgtggtatcagaagtgtttagtggagtttattcactacacatgcagttgttcttttgccatgaccgccattcattttctcgtcaaaacaaatctatgaagtttggttttcagactcatggttcttgtagctcttgtgaatttttttttcttctccttgcatgcattcttcaaattacatattgcatataccaggtgctctcctttattttatatttaatttttaaaattctatcatatattttttaatgtcaaacctcaaactaggggttcactgcatcttaggcttaccaggctaatatttctttacttaaccttttccctttatatttgctatcctcttgtgtagtaatcaccataagaagggtacaaactaaattaccctcccattcttttgtatcattctgaaatagtgtcacagagctttgatttttttgccctcatttaatctggcaaatgttctctctatttttttttttttactttcttttgacgggattctcaggcaattgttacggggagcagccagtcacactgtttctgtttattatgcaggtgagttacctgcccctctctgttatgattactgcgtttaagaagaccagcgttacaagacctcttgagggcttcggagttcttatcccttcgaatgagcaacataatggactgaagactctcggtaattgtctggttcacgtgtgtagcgaatcagattttcaaaccctgatttcgtaacattgcaggtactctgttttcatctatgatgtttccagatcgtgctttctccgatatgtatctctatactaccathgttggaggaagcagaaatagagaacttgcaaaagcttcaacgtatgagatatgcaatgttttaaatgtatgctatagtcatcgtttcaaccttttggtgcctttttcttactaatttatcctcctggtttaatgatcttagggatgaattggagcaaatagtttcgtctgatctccaccagctgttgggcactgagggaaaacctacttttgtgaagtattgatatctttcacccaacttaacatgatttgtgcttataatatgttaaataaagtaactgaaatcctgaaattaagactacgaaactgtatggtgacagtcatttttactggaacaatgcattccctttatatgggcacaattacgactcagttctgagagcaatagaaaagatggaaagagatcttcctggacttttttacgcaggtaatctgtcatttgcttgttgcgataaagttcatgtacagttggcatatcaatcaacttgcattctttcttgctaactccaaacaatcaggatcattaacttgtaggctgcagcaacagagagtatctcccaagttgttaggtttcatgtaacctcgtcgctgagatgaaatttccgttggctaaaaagtgaaagttttgtattgatgttacccaaaacaaaagtattttgcatgttgcttgaagttttggttgtttcagatagtacatcctttgacatgaaaataaatggaaaagcgtatgtcaagcaattatcatctagtttctttgtttctagatactagccgcatttgatcccagatcatttttgaggaagtcagctgaaataccgtagctatccttcagttttcataataaaactttaatggatctgatgtacagtaatttagtgtgcaccgggttaataattgatattaacttcatatagtgagtcttataaagatataatgaacttatatacaatatagtggattttattaatggaaaacatatagtgaaactatatgcaatatagtatgatacataaagacttagacaacaagagcattcgaaattacaaagaacaaaggaaagaacaattgtatcaaaccggttcgaatgaacaaacaaccaccacttccacaatcaatgtaccaccaatcaagactaaactataacaatgagcttctagtttaagtctactttgagttttaatcaccaattcaacgattagatgatcaaaattgcaaaggttaagagttggtcaaacctaaccaagagttacactaggcacatagctttgttaggagtatattagtttatgaattctagttaagttagaaatccaatacctagttggattaggattcctaattggattagaattatagtttagttagaattctagtaatagtaggcgtgtgattaggagatataattagcttaattcttatattgttagtttaattcttatcctcgttttaggtttatctttagtcgaacttgtaccctatataaggggcctttatttcattaataatatagtttattttgagtttaaacctttacttgtgattgtttgcttgagaggttattaatcgaaccattaataacttttcaggattgttaagtttttagtgttaaacatcttaatttcaggagtgattttaagagtgtttagattcttgtattcaagtttcaggactgatcttgaatcaagaaatatccctagtttcgactaatatcataagtagttcgaattcttggagtcttttcttcaagattcatattcataacttgattatttagacttcttggttttgtaatcatatcaagtggtatcagttttccagggaggagaggatacaaagggttctctttgatcaaagaagatccaagggcatcaataagaatgacacttgcaataagttcgagtgatacaaacaacttcaagactcgatcttttgctaccaagaaccaatcttgacgcctgaagattgttaggacaaaggataagaagtgtttctacatccaagattgcattctttacgtccaagattgcgtcaagatccattctttaagttcaagaaaggagtagaaagcattcgaacactacttaaacatgacatccgagatggataagctggctatggccatgagtgccttggcacaatcacaaactgagtcacgcaaccacatgggtaggatggaggcacgtgaccgtggattgaaactagatgactatagtggagatggcaatccagaagacttgttggagtggatttgccaactaggcaaagtgagtgattataggggctttgatcacaagaagagattcaaggttgcttccattaggctcacgaagtatgctggaatacggctcgaaggattgcatgcacaaacttcttgcctaatgactatgaacaaaaacagttcataaggctcgcatcaataagccaaaacacacttagtgtacacgaatacagcatggagtttgacaaattagggcttatatgtgacatagaagagaaagagcaatacaagattgcaatgtacattaaagggttgaatcgatatatagccaagaagatcgaagtctcaacttatcacttctttgaggatgtgactaaattggctaagaaattcgaagagcatgacaaagaagaagggcctaagagttcttacacacctaagtatgactctagtgctaaagggaaatcaacagttccctactcaaggtggtcggaaagacctaagaaccccactacacctaaggaggacactagcatggagaagacaaaagtggccgtacctaaggagagtttaattttgtgttttatacatctttgcttaagagcttaacaattgaaactattaataacttttcaggatggttaagtttttagtgttaaacatcttaatttcaggagtgattttaagagtatttagattcttgtattcaagtttcaggagtgatcttgaatcaagaaatatccccttgttcaactattataattgatcttattcgagttcttggagttaatttcttcaagattcatattcatacttgattattagacttcttggtttagtaatcatatcaatatcattagcattaatttacccccagggagattaagaaaggattagcctaatcaaggcgcttaagaagtttttaggaaaaatcgtgcttgttaagcttaagaattgaacttctttcaccatttgcccttgattctcttgttgaactagaagatcttggttcatagtagatgctcctgcatcatagtagagcatttaattttaattttttaacatgcacgaagatgtaggtagtgtagtatatatcgtgagacgtggtttaacatatagaaagatgtagtttctgcatgatatagtgagtttttgcatgatatagtgaatgtctgaatgatacagtggatcgttccgaattgttgtagtttgtatgatatagtatttttgtgaatgatatagtgagtttcttcatgatacaatgggtttctgaatgatatagtggattgcttagaaatgatatagtgagcttttgtatcatgtagtaggtttctatgtgatataggttgttaaaagatgatacatgcttttggcctcatgtactctaatgttaacgtgaacccggtccttgcaagtcaattgcagttttttcaatattaagctatttttttttttttttttttttttttttttttttttttgtacgggaatatttagcatctttaccacaaacataaccatacgaatattatgcggaaattccagtctgaagtcttaacttttcaaaattaaaagcttctatattatttttggaatgaaaaaaaatgagctatggcatgttattttgaaatacaatgagtctcaaggtgcatagtggcttcaattctacgaataatgaatggactactgatttctaattttttgttccgggcttttgcattaggtaaccataaagatggactctctgtgggaagaactatttcctctggatacaaagctgcggagcttgtgatatcctatctcaactctacttaagatgcctaaatgatcgaggagactccgtaagtcctttctctgattctatctttgaactgagtggaaacacgactgtggtctaaagtagttgatgtctcagatatccagaaatggcgttagtgatattcaggagctgtccattgaccctttgattcattgttgcagtttactgaaagttgttagctggtctcagaaaaacgaaaggaaaaaagggggaaaacaaaaacaaagaaacgtagattgtggtgttaaaatcaagaattccagagatttgtaccttctttatcagttgaattgtttacagtgtgaatcaagaagttagctcgaccttcttttcttgtgaatggtaagatttcgtgatcatcaatacttgattgtgctgtttgcaacttcaacggtaagatttcctgatcttacagtttaattgcttgtgctgtttgccactt

SEQ ID NO: 29 - DNA, 1575 bp, synthetic construct
  misc_feature 1..1575: note = F420I mutated Beta vulgaris PPO2
  source 1..1575: mol_type = other DNA
atggtaatgctatacgattctcacctctcaggagtctcaactcatcttcaactatcgcaggcatttcccaggaagaacccattaatggccaaagtgtctgagccgggtaaacccacttctgctaaaaggattgctgttgttggtgctggtgttagtggacttgctgccgcatataagctaaagtcccatggcttgagtgtgacattgtttgaagctgatactagagctggaggaaaactcaaaactgttgcaaaggatggtttgatttgggatgagggggcaaatactatgatagagagtgaagcggaggtcacgagtttactcgatgatcttgggcttcgtgagaagcagcagtttccaattgcacaaaacaaaagatacattgcgagagacggtcgtcctgtgctgataccttcgagtcccattgcacttctcaagagcaatatcctttcagcgcaatctaagctacaacttatgttggagccattcctttggagaaaacgctatgcttctaagatttctgatgagcatgctcaggaaagtgtgggtgagttttttgagcgacattttgggaaagagtttgttgattatctaattgatccttttgtcgcgggtacaagtggaggagatcctcagtctctttctatgcgtcatgcatttccagaagtatggaatattgagaacaagtttggctcactaatttccggattaattcaatctaaactgtctccaaagaaggaaaagggtggaggaggaaagccttcttctaatgaaaagacacgcatacgtggttcgttttctttccagggtggaatgcagacacttgttgacacaatatgcaatcagtttggtaaagatgaactcaaactacagtgcaaggtcctttcattgtcctacagtcataaggggatcccttcttcagaaaattgggtcgtgtcttctgtgtcaaaaaattccattgaagatcaacaatatgatgctgtcatcgttaccgctccaatcagcaatattaaagaactgaagattctgaaagctggagttccattttcacttgacttcattccagaggtgagttacctgcccctctctgttatgattactgcgtttaagaagaccagcgttacaagacctcttgagggcttcggagttcttatcccttcgaatgagcaacataatggactgaagactctcggtactctgttttcatctatgatgtttccagatcgtgctttctccgatatgtatctctatactaccathgttggaggaagcagaaatagagaacttgcaaaagcttcaacggatgaattggagcaaatagtttcgtctgatctccaccagctgttgggcactgagggaaaacctacttttgtgaatcatttttactggaacaatgcattccctttatatgggcacaattacgactcagttctgagagcaatagaaaagatggaaagagatcttcctggacttttttacgcaggtaaccataaagatggactctctgtgggaagaactatttcctctggatacaaagctgcggagcttgtgatatcctatctcaactctacttaa

SEQ ID NO: 30 - protein, 524 aa, synthetic construct
  REGION 1..524: note = F420I mutant protein of Beta vulgaris PPO2
MVMLYDSHLSGVSTHLQLSQAFPRKNPLMAKVSEPGKPTSAKRIAVVGAGVSGLAAAYKLKSHGLSVTLFEADTRAGGKLKTVAKDGLIWDEGANTMIESEAEVTSLLDDLGLREKQQFPIAQNKRYIARDGRPVLIPSSPIALLKSNILSAQSKLQLMLEPFLWRKRYASKISDEHAQESVGEFFERHFGKEFVDYLIDPFVAGTSGGDPQSLSMRHAFPEVWNIENKFGSLISGLIQSKLSPKKEKGGGGKPSSNEKTRIRGSFSFQGGMQTLVDTICNQFGKDELKLQCKVLSLSYSHKGIPSSENWVVSSVSKNSIEDQQYDAVIVTAPISNIKELKILKAGVPFSLDFIPEVSYLPLSVMITAFKKTSVTRPLEGFGVLIPSNEQHNGLKTLGTLFSSMMFPDRAFSDMYLYTTIVGGSRNRELAKASTDELEQIVSSDLHQLLGTEGKPTFVNHFYWNNAFPLYGHNYDSVLRAIEKMERDLPGLFYAGNHKDGLSVGRTISSGYKAAELVISYLNST

SEQ ID NO: 31 - DNA, 37009 bp, synthetic construct
  misc_feature 1..37009: note = F420L mutated Beta vulgaris PPO2
  variation 32531: note = n is any nucleotide
  source 1..37009: mol_type = other DNA
tattccatcgaatgtagcaaattgactgtccgttgcaatttcggagtttccactcgtcgcatggtaaatggtaatgctatacgattctcacctctcaggagtctcaactcatcttcaactatcgcaggcatttcccaggaagaacccattaatggccaaagtgtctgagccgggtaaacccagtaagtcaaacattcgaatcacaactcaagcaaatttgtcttgtttgcgttatattttgctcatttcagccttttttgtttttccgacctttgcatactgaatattgtgtgtgtgtgtgtgtggggtttcagcttctgctaaaaggattgctgttgttggtgctggtgttaggtaaattttcgtctcttgcagagtttttgagtcatttgggaattctatgtgaaacttgtaactcccttcagtccaacgaacgcagtacaattttctatcaaatcatggtcctaatttccaattttccatatatattgttggaattatattgggattgtctatcactattaatagtattaggatcaattgtagagaagcacagaaatttttgggatcgaaagaatatctggattgccacattaacagcagatataattcttccaattggtttttggttcttcctaccttgacttgtctggtcaaacattataaactttaacctttaatatccattaaagtaaactataggatttttttgtctaaaacatgcttatataacatgaaatttgtgagaaaccaccttatatatatttttttgcgaaaacaaaccttaaacaaaattattatcgtgagaacaaaccttatgccaatttcgatcattgacccaaggttttggcattgaccgtgtcatgaattttgttgggtttaaaaagtcatgtgtcttgcatacgaaatggtaaatgcgggaaccttgggtcaatgtttggaatccgcataaggtttgttctcccaaaaaatgtttttgttcaaggtttgtttttgcaaaaaaacttatataaggtgctttctcagaaatttcatgttttataaagtagtatttgacaaaaaaccctaaaatatattatagaattattattgactaaattgtgtaaaaatgtactcttctaaaagtacattatagtattttagtggaacatttgcgagaaactactttataaatacgatttttgcgagaaatttcctaataaaaaaatgtgaagtgcaaaactatcttattgataattttctactccctcaaatccaaaatactatgaagtctttcctttctggtttgtcccagattagtttgtacgcttccatctttggtatgatcccacttttattatacttattagttttacgtgagttccttactctatctcttttaacaaaaatactcaactatctctatccaataaaaagttccttactagtcctatcacatctgctttttaataaaataacgtttgataaccacacaacttatatccttaaaatacacgttcaaccaagtgttgagattaatttggacggagggaataaatattttttgaggcatattggtagcagtattcggattccgataggttgactatgtttccaatgttgaccaacacttgccttgcatgtaattctaactttgctcttttttattcttcatttccctcgtattccatatacaatgtttagagacccattccttcctcttctcttctttcccttccttactatgctttgccataatcttcctcaaatgagtgcaaattaatttgtcgttgatgtaggccaactgattgtagcacatcttcatagttcatacctcaacacactcgtaattatattataccctacatgttaaatggctcatgaagctttattttatatcatacttcctccgtttcacaataagtgtaacacttttcttatttggaataatcacaataagtgaaaccaagctccaaatggtaagaaaagttcactcttattacaaatataccaccaaaaagtaagaggggatcacaacttcaatacttcttcactctactttattgtggtcccaactttctctctctaaattccttggtaactccccactttctctatgtttcacttatggtgaaatggaggaagtattttgtagtggtatttagctactaggccttggatgatatacaatcatacaatgtatttatattcacgataatttgctgcccaccttgattaccatgatttccaccaattttatcaatttcagtacttcaccaccccgaatttatattttttatttccaaccttggtatctccatttgtctgagtgcccgatccatttgtatcgcctccagaattgaagaagcttcctgcagctagacaattaggaaggttaaaaaagtttggagatggtggaggatagccataataatcattgttgggaggtggaacttggaaggttattgtagggttgaagtccttgatgaagaagaattgagttcaaatgagaggaaaaaggagcagggaagagggacaataagaaaaaaaagggtaaactaaaatcacgtgtaaggcatgtgcagatcaacatcagaaagcatagtcaacctactggtattagggcactgatacctttttgggtcaaaatttttttacaaggtatttcatgaggtagttttgtccatttttttttttacaaggtatcgtctcattttttttttatcatttagtttctcgcaataagtgtatttcatgaggtagttttttccaaaatttcctcatttattataaaatacctcatcttttccataaataatgcaatgtctagacttttacgctgtttacacatgctcctttgaccatctattgacacacaaggaaaaatagagtagagtcatgcaggatcttgttagatttttctcgatatatactttcaaaagatcaatttttttataattttttttttgaggggattttttttttataattatgtacttatcaaaggtcaaagttgtgcaccgggaagcataaaactctatgtgttgcaatttacatggaaggggaggagtataataagagaaaattatggtaaaaggttcattcctggagatcatgagaaaggaagtagaaagaacaaaaaagaacaatgggagtgcttttcaatgtttgttgtacgtagcatttattcatttgctataatgttttgtgacattgtagtggacttgctgccgcatataagctaaagtcccatggcttgagtgtgacattgtttgaagctgatactagagctggaggaaaactcaaaactgttgcaaaggatggtttgatttgggatgagggggcaaatactatggtaatgtttttgattattgcaggtcttgcactttagcgcacaattaatttctggatttttttttgtactgtggtggttatggtcatcaacatgtctcacccactgtgcttgcagatagagagtgaagcggaggtcacgagtttactcgatgatcttgggcttcgtgagaagcagcagtttgtaagtctttcattatctgaatggcacatactttatttcgaaagattgtaattgccttttctttctagatggcttcatcttcatgttgctttctgattcagtttcgtggctaactttccaagtttgtctgattgctaactctgtcatagccaattgcacaaaacaaaagatacattgcgagagacggtcgtcctgtgctggtaagtttgcttgttttacttttgacctcttttaagatctttcaactctggagcctggaaacatggtgatgcaggaggcaagttctctctattttacatcctttcttctctgtatcttatgacatttgcctcttattctgtgcagataccttcgagtcccattgcacttctcaagagcaatatcctttcagcgcaatctaaggtcgttttatgttaagacatacttgatgctgagagtttattgaattcttaaccttcttcttattttttttttatttttttagcaaaaggtaagtatattgcatttaccaaaaaacagtatgtacaccaccacagcagccatgtcagaatctagaaataccaccgaaaaaatcctacacccaaccagagacagttatattatatcctactcctaagtttctgtacccaatttacatcaatattggtccatttacaagatatttttataattcacagaagcacatcagttttaattagtttaataatgacctctggatgaataaccaactcagaccatatagccttattcctggctttccggaagttgtacgccagagcagcaagcacagcaatgcaaacctgtttcttatacctccttttatgtgtcttagcccatctcttatagctagtgaagatacagtcgtgtgcacaggattgaaccccaatccaactagcgaaagcctcacaacattatgactataaatacatctgaagtataaatgctgcacctttttctcctcttgcctgcacggtatcagaacaaatcccagctttagctaacaattccctggttttcagtttattcaatgccatcatgcaagcaatgaaagaatgttttggaacattcagtttgttccaaacacagtgagagcaagggacctttcctgcagttccacttagccacttatatccctgactaatagtatgactctttgcaccgtaaattgatttcaacttaactttttcataagcagtgaattgtgtgttgttagagtgtctagctgtctaggagattgggagaaaaggagggaccaaggagatagaaacacacctttgtgtttctttgtgtatttactttttagggtgggtcacgttttctgagaaatttgggaaaaggaagaaatagtaacacactttcccatttgtataacctgtatactggagctccaatataatttgcatttttttttgagctgcaagaatatgttgacaaacagttattgcttcttcctcagctacaacttatgttggagccattcctttggagaaaacgctatgcttctaagatttctgatgagcatgctcaggaaaggtaatgtcaagacatgtgttacctcgccttaattttcgttccaggaggtgagcatgcatttagaactaaaaggcacaaagactgttggtggtcttgcctgttcaaatataatggagaggagttttcgctacatttaccctctcttgaagtggggttgaaatatagcatcaagttgaatgcttgattaagtttaaaggacttgtgtaactctttttctgtttactgtgattacatgacctggttgattaacataatggtctgtttatctgtagtgtgggtgagttttttgagcgacattttgggaaagaggtaatggtttaccatagtatttctgctttagtggtaaattgtaatgttgctgataattatacttcgctgcagtttgttgattatctaattgatccttttgtcgcgggtacaagtggaggagatcctcagtctctttctgtaagtgaacattttgtgcttcactcccaattttttggaggctggaaatagattcttttccagttgttctgtcaaaaatagatgtagctttattttgaatttgaagttcccaattgttcattttgactattactgattattgctaagagtggcattatgctattatgctcctaaaagaaaggtgaattttgacctacatatagtataatgtatcaatattggtttaattgtttgttcttttgttccttttggtgctcatcttgcgccttgttctcatcgctcgttttttcatgttgcacttgatttaaatttgctcagcttaacttgtctttttgaatttatattacttattgctatattttactaatttcgttgaaactaattttttgctgaacttttcgttttgttgaaatcatttttctgaattaacttgattttcctgaatagaattgaattttggtgatcttaccttttctgcagccttttatttctttcttgtcctttttccaatctcatttttttatatttccattgtgttgacatcttatcattaactgtgcagatgcgtcatgcatttccagaagtatggaatattgagaacaagtatggaccataagacgtttattttaatcgacatgtatgtttcttagtttatacatatattaattctgtggtaaaaaaaccgaacaagaatatctttttttttttctatcatcaaaaagggtgaatatatgtagaggaaaaagatttgaatcaagatattagcctaaagcaataataatgttagtaatagctttaataacaaattcaaaacgtacattaatgaaccgagaggccggaaaatagttaaagtgaccactaagagaagcgaaggattcatgatgggttttcaacccagtagggcaaatttgttcaatgttctttacaaatcaagcttattaccttgtgggtgtttttgctagagatgaatgatagaattttccctagttggaagtcttttttggttactttatgggagctagtgatgtaatttgtttcgccttatggcatttcctaacatgtgcttttgtgatgtattgaagctttttttttgccttaatttatgctggattttaattttgttctttgtttcatttttcttgcttttgaaaaaaatatatagatatgtatatattaggattggtcgaggattttgagggaagggaaagacctaagaaaacttggatgagggtgattgatagtgatatgagtctatttgggatcgaagaaaatattcctttggataaggtgtagtggagggttgagggagcaaatttatgcagattagcttgacttaaagtttttctttttgattatttttcatttacttgtgttttgcaaacatttactcatgaatgatgtaaacttcttcaaccaaatctctggaaaaaaataatctacatggaaaaaacattattaatgttaacttgacagagatcccatccttgtgaagcagctagcaattaggcatctaacaattgacattttaatggacaggatagaatgtctcttgatagtcaataccctctgtttcattgtatcccatagctactaatctagtttgtatctttccaaagaaccattattttgaagtttcaccttgaacacccattttgaaccaatatgtttcttgcccttggggagaggggctaattgccatgttttgatgcggatgcaaagacacttgttctacctgagcctattgacttgatcatggatactctagggtttgaactcaagggaaagaatcaagtcttggcatgtgtggtgacatggcgtggggatggagtaaagaagagtcatagttctgttaggatatgttcttgcttgctacatagaatcgtagttctgttaggattgctatgatattatatctagtagatagattttatagttaattaggataaacatgtgatgatcatgttataataggcatgtgattagaggataggattagcttaattcttatcttgttgttagtttaattcttatcctagttttatgtttatcttagtcgaagttgtagccatataaagggcgttccattcattaataatacttagttttgctttgtgttttaaacatacttcttgattattgtttgcttgtgagctaactaatcaaaccattaaagacttttcaggagttttagtgctaaacatcttaatttcaggagtgattttaagagcgtttagtgatcttgaatcaagaaatatccttgttcttgttcgactaatatcagtggttttgttcgagttcttggagttaatctcttcaagattcttattcaacttgattgttgagcttattggtttagtaatcatatcaagtggtatcagttttccagggaggagaggatagataggattctctttgatcaacaaagatccaagggctatcaacaaggttcaaacattgctgcttgttcaagacttgatctttttctaccaagatgcattctttacgtcacaaggtagtaataacaagattaagagtggtttttacatccaagaatcaatctttcacgtccaagatttcatctttcacgtctaagattcattctttaagatcaagaaagttataacaagcatagaagaacacataaccatggagtccgagatggacaagcttgccaaagctatgcaagcacttgcaaagtcgcaaactgaatcacagagtcgactcaatgagaatactaccacaatcaatgggattggtagtaacatgaataggttggaggcacgcatggatgccattgcaaccatcatacaaaagaagcttgatcggaatagtgccaacttcataggtgccaattcagaggaagagttggcagaacgtgaagaaagatcatccaagactacatacaatgatgatcgtggcttaaagttggatgactataatggagatagcaatcgagaagacttgttacagtggattcgacaacttgagaaggtatgtgattatagaggctttgatgacaagaaaagattcaggattgcctccataagactcacgaaatatgctggaatttggcttgaaagcttcaaggcacaacgagccaagaaaggtaaagaaaagttgtgtagttggacaaagttgaaagttcaagcttaaagagaagttcttgcctagtgactatgaacaaaaatagttcataagactctctactataagccaagacacgcttagtgtacatgagtacaccatggaatttgacaagctagggcttatatttgacatagaggagaaagaacaatggaagattgcaagatacatcaaaggcttgaaccgccacattgccaagaaggtggaagtatccacttatcacacctttgaggatgtgacaaagttggctaagaagtttgaagaacatgagaaggaagagaagcctaagagttcttacacgcctaagtatgatactaatgctaaggccaaggctagcttcctactcaaagtggtatgaaggacctaagaggctaagaacctcaccccacctaaagaagacacaagagttgagaagcctaaagtcgtcgttccaaaggagaaatttgaagagatgagaaagtgcttcaagtgtcaaggaaggagacacatagcaagcaattgtcctaacaaaagagtcctcaccatgagacaatacctagctttgcaagaagaggaggatgtctattagttcgtccctgatgaagagcaaacttaggggaagaagaggaggaggatgcttttgctgaggatgatgcaaggctagtaggggtcaagaggcgcaccttacatgtcgaccatacacctagcatggagcaaatggaaaaatcttttccacactagatgcaaggtaggtgactatatatgtaatggtataatagatagtggttcttgcactaatgttattgtatctgaggtagtgtcaaagctaaacttagctacaagggcacaccctaagccatacaagttgagtttgctagatgatagcactggcatgagagtaaagaaacaagctttgatttcattctctataggggttataaggatgagttatggggtgatgtattgcctatgagtgcatgtcatctcttgcttggaagaccattgcagtttgataaaaaggtcatccatgagggggactctaatgtgtactctgtgttggttggttctaagagggtatgtttgcatcccttagctcctcattcagtggcgccaaagcaaccacctaagacaccaagttactttctatcttcaagggagttcgaacaagaggtggaggaagaaggttgtgcttatgccttgattgtaagacatgctgccacaagtgtcaagactactagcaatgagaagctcgaagccttgatgaaagagtttgaggatgtctttctagaggaactacgacccttgagaggcatagaacatgctgtagaccttgtacctggcgcccctttgcctaacaagcctgcttataagtgtgatccagtggcatctagggaattgcaacgccaaattgaggacctaattgaaaagggctatttaagggagatcatgagtccatgtgttgtgccagctttactagttcctaagaaagatgacacatggaggatgtgcatagatagtagagcagtgaacaacattacagtcaagtaaaggtttcctatgcctagattggaagatatgttggataagttacatggggcatcaatcttttctaagattgatcttcgaagtggctaccaccaaatgaggatcagagaaggtgatgagtggaaaacaacattcaagaccaagcagggattgtatgagtggatggtgatgccatttgccttatgcaatgcgccaagctctttcatgagcttgatgaatgaggtacttcgtccgttccttaacaagtttgtggttgtttacatagatgatatacatatctatagccaaaatgtggaggaacacttgttgaacttgcgtagcttattcatgaagcttagagagcaccaactctatggtaagattgatggcgacgaggttgacgggggattatggcggcagtgaatcaccctctttgccggtcactgaaatacaacctgaggtatctttaaattctgtaattggattgactaacccaaaaactatgaaattgctgggaaaaattgctggatgtgaagttgtggtgatgattgaccctggggcaacccataattttttatcactagctactgttgagaaattagctattcctgtgtcggaatcggaaggatttggggtttctctaggggatggacaggcggtgaggggtagtggaatttgtagaggggtgttattgagtttaaatggtggagttgaagtggaaacagattttcagcctctgggtcttggtaattcggacgtgattttgggtgtacagtggctggagacgttggggacagtggagagcaattggaaaacacaaacaatggggtttgaaatcgagggtgtcaagttcactttgaaggtgacccatcactggcgaggtctcgaatctcactcaaagccatgatacgtaccttatgtaaagagggtggaggtttgtggcttgagttgaaccagattgagcattatcaggagaaaacaccgcattcatcagccttacctgaaattccagttttcttacagagagtccttacccaatttcagtctgtgtttgctacaccagaaggcttaccaccgataagagaacatgaacatgcaatagttcttagagaagggtgtaatccggtaggggtaataccgtaccgttatccacagttccaaaaagatgagatagagcgcctcatcaaagaaatgttggcttccggaatcatcaatccttccacgagccctttctcgagcccggtgatattagtgaagaagaaagatgggtcgtggcggttttgtgtagactatcgggccctcaataaagaaacggtccccgataagtatcccattcccgtgattgatgaattgttggatgagcttcatggggcaacacttttttcaaaactcgacttaagggccgggtatcaccagatccgggttaaggccgaagacactctcaaaacagcttttcgcactcatgaggggcattacgagtttttagtaatgccatttgggttgacaaacgcgccggcaacgtttcaatcccttatgaacgaggtcttcaaaccattcttgcgcaagtttgtcttggtatttttcgacgatatattggtctacagtagttctgccaggaacatgaggagcatttgaccttggtgttgcacaccctagcagctcataaattgtttgtgaatcagaagaaatgtgattttggcaggtcggaagtagcatatatggggcatatcatctctggtcaaggggtggctgtggatatggagaaggttcaagcgatggtggaatggccccttcctaaaaacctccgggaattacggggatttttgggccttacagggtactaccgcaaattcgtacttcactatgctcatatagccaagcctttaactgatcaactcaagagagatgcgtttgggtggtctgaggcagcaactcaagcctttgaaaagctcaagaaggcgatgatcacatcccctgttttggcaatgccggacttccaagagttgtttgtggttgagaccgacgcatccgggtatggtctgggggcagtgttaatgcaaaacaaccgacccattgccttttacagtaagttgttaggtgcccgggctcaattaaagtcgatctacgaaatggagttgatggccatctgcatggcagttcagaattggagatattatctgctgggtcgacatttcctcattcgtacagaccaacagagtttacgtcatctcactcagcagcgagaagtaagtactgccttccaacgttggatgagtaaacttatggggttcgattttgaaatacagtttaagccggggtgtgccaaccgggtagctgatgcattatcccgcaagacagtgggagaggttgaattgggtgcgctgatattaactcatggggtggactggaccgacttggagcgtgaaattgaaggcgatcctctgttgtgcaaaattaaacaagacttccacgggggtgctattactcctgtgcacttttctttggtggacaacaagctgttgttcaagggtcgatacgtgattcccagctcttcggtttttattcctaccttgctgcgagaatatcacgattctcccattggagggcattcgggggacctcaaaacatatctcaggatggctgccgactggtattggaggggcatgcgcaaggatgtggcgcggtatgtgcaacattgtagcgtgtgtcaacaacaaaaaatgtctcaacagatgccagggggggtactacaaccactccccataccttcctcggtttgggatgacttgtcaatggacttcgtggaaggcttgccatcttccaagggggtaaacaccatcctcgtggtggtcgatcgtttgtctaagtacgcccacttcctcccactacgtcatccatttactgctgtgtcggtggcaaatgtgtttgtcaaagaggtggttcgtttgcatgggtttccttcctccattgtttcagatcgggatcgaatttttatgagtgtgttttggcgggaattatttcgtttacatgacaccacactcaaacgaagtaccgcgtatcatcctcaaacggatggtcagtccgaaatcgtcaatcgagctctggagacttatttgcgttgctttgtgggggaatacccgcgctcttgggctcagtggcttgggccgaattttcatataatacttctcctcatctctctaccaaaatgaccccgtcaaggtcctttatggtagagaccctcctactgtgatacgggttaatcggggagcctcacctgttgaaagcttggaaaacatgctccaagagcgagacgcagtattagatgccttgcagattaatctgattaaagctcaacagaaaatgaagagtagtgctgatgctacaagaagagaggtgcattttaaggtgggagatcgagtgtacttaaaattacagccttaccgtcagaaatctttggcttaacgcccttatgagaagttagccgcccgtttctacggaccatttactattttacagaagattgggcaagctgcatacaagttacaacttcctgtttctagcaaggtgcatccggtgtttcatgtctcccaactgaaacaggccgttggttccattcccgtttcagccactattccagagcaattgtcttctgacttggagttagaggtggaacctgatgaactcctcgatgttcgtagtgtttctagaggccagcacacttacttggaagctctcattcagtggcagggattaccatcattcgaagctacctgggaagatgtggctgctttccatcaccattttccatccttccaccttgaggacaaggtgaaactttgggggggtggtaatgtgatgcaccaaactaccactccactactcacctattagaggcgtaagaaaaagggggtaaatcaggaatagtttacaaattctgttgaaaggaatattttgtaattatgatgtcagaggttgttagcaaaaaggcagtagagtaacaataaaaaggggaagggaggagagaagaaggtattgagatttttgtaaggaacttggcccttgggagagttgggagcctctcgaaagctcaccattatcttgtgaatattttccttcctggttatatacaagaaccttcctctgtcaatttcttttctctctaatcttatttcttattctgttttctggttgccattgtttgaagttgcttgttgtgcttgagtaaatacgtgaagtggtgaaacccatctgaattcatcacatctattccaagtggtataatacaagcttgtaatccaaatctaatgagaaatctaagttatgaagaatttcaaaagaactaagtacccttgttttggatgcccaaggatttacttgccgctcaagttaatgctcaacgtgcaagatacaacctctttagtatcccaaggtagtttccataagaattaattgagctcaaatcaagaacaatatttttatgtattaatgtgaacacttcctgaattatattagatatatggtctgaaggttggaagaaagattagcttttaattttaagtttgagatagtttttagaatcgaggaaagattagctcttaacttgtaaactaaggattgctttataagtaaaacattagttatggaactcttaaaattggttttgaacatttctagttaaaaatcccatgtaattctcccaaactagcttaaaatctcacatttcacaagctaaggagagacaaatggcgttctcttgtgaaacaatctaaaattttcattaggctactgttttcaagtatttatatgttagaagtgccgcatataggtacataaaataagtttacaaacacaagtaggaataaggaaaactaaaagagaaacttcagccatacaaaaccggctgaaatcagctactactttctactttctagcttcaaaatctgattgcaagtctcctttaagccaatcaccaatgaaaacctttcctccacatgaagtgtgctcaaatcaagagaagaaacccatcattcgcctatagctacctgggtcagatgaagatacggcaaaaaaaacgctggaaatcagtgaaccaaaataagcaccaattggatgctttctgtccttgctacattttcttctcataggactacttcaagccatacatgaataagcagttagatccagctcctagcatccatttgatcgtacaaatgagctccaaaaagataagtaaaaccaagcagccaaaacctaattaatactaatgatgaattagttgaatagctaatgacgatgaagcaacactttagtaggaatagtgttaattatgatcaatgctacttaatcttctgattaatttttggaaaaatgtcatatctaccttctgtatacacttattcataactatatcgtattattattatttttaaataactaccttttaagtaccaaaacctaagaaatcaggcacttgatggattccatccaaagatccatttggcggggcccactaactgacttttgattttttgcctttcctcttttggttaatctcaatggttcatcaataacaactcaatcttctccccatttcatcaaatcatccctaaatcagaactttttcaaattcacccaaatgaggttatggaaacctctaccaagtttattcgaccacttttagtctagctcaaagttttacacttgcttcaaaaactaagatttattaactttagaaattaggtttttatttttattttttatttaactttgtaacaatcttaaataactcaggtgctttctagagtttggctttaattgtttttcccttggttatgtgaaagaagtatgactactttctccaagactaaagtagagagcaaaaaatgcaattctggaatttcttgcaaaagaaaaggaacgagttaatgataatgaaaaacaaagaaaatgatgagaagagaggagctgaatcaatcatgatcatgtattttaaagttttttttgctattgaagtgacttaagaagaggaaagaggatgagtgaagacaaacaaaagaaaggataaatagagggaaatcttgggcttagaaaggtgaaaaggtaagaagatgagttagtgggccccaacaaatgtatctttggatataatccgtcatgccactgtttggggcttgcttaagtccatacattacttcactaattttacaaaatttattttcttgaccaagaactgaaaaaaccttcagtggtgatctattaggttttggaagttaaaaggtagttatttaaatgtttttaatataaaaggtagttatttagatatttttaatataaaaggtagttatgtgaataaaagtgtatataaaatgtaattttttgacatttttgccttagtttttcttgctaattcaccttttcaacttgaccaagttgctatgaggagaaaacgagcaattattaagcaaatcgcaacactagcattaatccatggcccatgaaactctccataattagagattggattagcacttagtagaacttcttgctcctgctccaggtttccattacttctttatctaagtgcatcaaaaggttgttgggttatgaaaggtggtggttgtgtatagtcattgtcaaaatgttgttaatgcactctatttagaggatgagggattgaatagttttcacctcgtgacctttcattcctttttaaaaaaattgataatgtgtattggtcctatgactgtatgaatggtaataagctatctcatgagctgttactatcttcctcagagtctaggtagaagggtttgggctgataattttctactatgtgcaattagtttgttggatttggatatgctagttgatataggtcctttcccttgggccttctcttaatataggcctacagtgtgattgaagataaatcttctggagaatataagaacaatgagatggattggttagaggttgatttgttcttttggtgtaagactatttcgggttctctattggttatgttcagacgccagaatatgtgttggtgattgttttccatgaacatactttatccgcagagacatttttcttttttcttcctataagattatatttgtttcctctcttggtgctcatctcagtgtctctactttacgttaaactgttgacattacttgacaatgcgtatatttgtcgcatggtgctcttccctcactccacgtcgaccccatacatcaaaaaatgccattaaagaatattcgaactcacaaccttgtgttgaaagaatggaatccctaccaatgactcattaattcattttctctttaagaaataaatgatttcctcacaaacttttaggctttaagagcccaaaagataaaaacataaaataagatagacatcaacgtcaagattagccttaaatgcacaaagcacatgtcaaatgattgataactactcacgagttgcaactctttgggcgttgcctaatattaattggatctcttttaaaaattgttggtggttatggttggtggagaggaccatgtaacttttagctggtcacaactggtaatgattgtcacttttactgcccataaaaaaatttaaactgttgaatatgtttctggcagtggatctgacaaatcctttacaagttggcgtccattttgttttgccatgtgactcaattataatacgtgagttttattatccaccaggtttggctcactaatttccggattaattcaatctaaactgtctccaaagaaggaaaagggtggaggaggaaagccttcttctaatgaaaagacacgcatacgtggttcgttttctttccagggtggaatgcaggtattagcatgtagctttcattctgttaacatttgtggttcttccagacatacatccaatgctttttttttttcttgctataaccataaacattcttgtcatgaacattctttaatactgttgctgagcttagtgtattcgttcattcatgtaatttcctctcttgaggttaaaatggcatacagccttacaacctatatccataatgctccttagagtagaatccctaggttataacatagtaccacttatcaaaataaacatggcacacactgcaggacaagaagtaaatccacctagagaactgagcacctagtagtaaaagcagcgatacattactaataacagtagcagggccataagagtagtaaatgggcctcatttcaacactccccccgtaatggtgagagagaagaagcagtctgaactcccagcttggagagcaaaatagagtgttgctgaacagggagaaccttagtgaaaacatctggcacttgatcttgagatggaacataggtaggctgaataaccccttcttcatttgtattgtccctcaggaaatgacaatctatgtctacatgcttggttttctcatgatgaactagatatgctgctatggcaagagcagcttggttatcacagtagataggagtagcactggactttttaatgcgaagatctttgaggagttgtttgatccacatcacctcacacacagcaagagccatggatctgtactctgcactgaccacaagaaattgcctctttgactttcaagatacggggggagtcaccaaggagcacacaaaaccagatgtagaatttacaacacccatcccattcactatcacaaaatgctgttagttgagcactagacttgttcgccatgagaattcaccctgttggcagcttgaagatgcacattagtggggcagtgcataaatttgcttaaatcatgtatagtgaaggcaatatcaggcattgccttgtaatagtgagataaatgagcttccccatcaatttttgatacacatcaggttgttgaagaggatcaccattgtcagcatagagcttgacatgtgagtccatacgaagcctcaatcgtctgcaatttataaaaccatattcatcaacaagacccatcacatacttctttagagataaaaacgatacttcactacactgatccacttcaatcctcaaaaaatatcttaggccacccatatctttcatgtgaaattggccagcgaagaaactctttgcttcctcaatagttgctaaactattgccagcaagaatgaggtcgtccacatacaccaatatagcactgaaacagtgagagttttgcttgaagaatagagagtagtcacacttggattaagtgaatacattttgctttaaagcagtgttagcttggcaaaccattgcctcaaagcctacttcaagccataaagtgacttaagcagcttgcacaccttagttcatttggtgtcacttctgccatcagtacttagctccccctctccttgaactttgatcctgttacatgtttcactatatcctggtgatagcttcatgtatacactatcctacaattcaccatgcaaaaaagcatttttaacatccatttgtttgcaagaaccaaccctctaaggatgcaacaacaagcatgtggtcatctttgctacaggggtaaaagtctgctcataatctattccatatctctgtctgtcacccatgattacaagccttggcttatgcctattatttgtgccatcagtgctgtattttgttctgatccatccatgtgagggatggctcatttctacaaaatcctagttccgttaggatttgtgttgttttcctaattctagtaggaataggactcctaaaatcctaatcctcctagttctgttaggagtttaaaagttttagtttgattgtaattctagttgtgttagaaatccaaatcctagattcatgtcacgtatggttagaacatggctagtaggataatttgtcttgtgatgtccatagccttggcatttgtggcacctaactttcaatagcttgtcttctgtctccttttctttctccttctttgaggaatcaacgtttttagagctatctaaaccactagcatcaatattaggtttaaaagtgctaaaagatttcgaatagttcttacttgcatacaatttctttttctagtttatgtagcgtcaccagggaacaaaaactcggccgttccgttctggaacggccgctttgtaacggatttcagagaggccgttccgttaaataccgttctagaacggtgatttggaattcacaccaaactcggcgcgatagcgttacgtaacggtgtaacggcgttccagaaccgttacaatcacataacgtccgttatttgaagaagaccagttcttttggtggaggaagaagaagagccaacgcaagatctatagatctgagttaaaatttgaaaataaaacatgtttttttatttaaattaaagcttacagaggatgtagaactcaaattcgagtaaacccctcctttaatttcattaggttactgcaaatcgaaccctaaattgcaaaccctaatttcgaaaaaaccctaatatgcattgggatgcaacgctgcttctccggtcatggcagagaaggtcgacgagtcatcttcggctgcttttagcactgtagctgccggtggttggcttgtttgcaggttagtgcttgctggttttctttctctcataccgatcatcttcttcttttctctcttctctttttcttttttattgtgtgactgccagtcacgtgataattgcaactcataaagtatctctttctctctcttcttttcatccctttttatttttctttcccttttagtttttattccctcacgtggaatcacctaattttcatccttttttatttttttagttacactcttacacagaagtatgttcaaatatcattatagtacctcaaatattgtatttataagagttttggacataatatgatatagaaagtaaaatagaagaaaaataaagtttaaatgtcacttgtgtgatttttttaaaaaaattcacgccgcgacggccgcgaaacgttctatttcccgttacaagccgttcccgcgataacgcgaccgttcccgcgaacgcgaccgcgaccgcgttttttttccttgagcgtcacatcttgcaagcttcttcaaaggtgagttatgtgtacaactccaatttctctccaatcccctccgtcctcatttaggcctccaaggaagctacttaaacattgatcttcaagttcatcaattttccaaagaatggataacttctcgaactcctttatgtaatcttcaacggacatattcccttgtttaagagtagaccattccatgtacaagctttgtttgtagttagaaggaacaaaacgtcctcttaacaactttttaagcttatcccaagtagagattttgggtttattagctttcacacgctgcctctttactccatccaaccaaatagatgcatatttggttaccttaagcacggccaccttgtatttcttttcttttggtgtctcttaatcccaagtagagcttttgcgtgtgaaagctaataaacacaaaatctctacttgggataatcttcttcttgtttccgaaacaactaattcttatggtagttaggaaagcaagaatggtttctaattcaatagggaatatattaattattattagtttaagttaaatagtgcacgaatctaaatagattattcgtctcaaaatctcacttaagtatagatttgtttggacatctgagggaagaagaagagagcgagataaaggagaattatcactcaatgaatccatatcccgagttttcccatttacttctttgaaagcaatatagttcacgaggtcttattatcagtctatggacataagagtaataatttaagggcaaaaactatgactttatgggtttaaactgatacatgttctgttaaactgatagatgttctgtgttaaaccgatactcatatattcctggttaaactgatagatatatgatttaaattgatacccgtctcagtcatgtcttggattgagacggtctgacacaagactttttgtgtattatatatctgattagaataaatttatcctgtttactaattattttatcttctccagacacttgttgacacaatatgcaatcagtttggtaaagatgaactcaaactacagtgcaaggtcctttcattgtcctacagtcataaggggatcccttcttcagaaaattgggtcgtgtcttctgtgtcaaaaaattccattgaagatcaacaatatgatgctgtcatcgttaccgtgagttttactttgcttactgctattgcaccaatctttcttcttttgacacactgataatggcaatgctgttgtggtttgaagccatgttatggggttttagggatatttatggagtctgatctaatatgttattggataaaattcagatctgtaacgtgactcaatgagattgaaaaaaattgaatcaagataatggattggaaaattaggagctaacctagggtctataagcgatccacttggagtctcataccaagcaggtattcgacattttaggtttatattgctgctatggctcatatgggagcctacatagggtctggtgcttattcctttttcttttgtctagttttggggctgcacatttctgttgtgttttgatatggatagccatcacctgcaattgcatggaggctgaactaagttctataggggagcaaacagtatctgttggaaatttattttcatattgtgtttttaaatgctataatccaaaatttgttgttcccctaaaatgcctaaaatacccttatgtaactgctccatctgtcccttaatagacttcccatttctccaatgcatgtttgccaatacacattttgtattgttaatatcaaaaattacatattagtaaaaattataaaagtttgattttcctaatgtacgcaatgagacgaatcaaacaagacgccatatgactatgttttttcttatacttcctatgttttttaataagtgacatgttttccttttagggaaatgtcacaataagtgacacatagctcaaagtagtaaaaatacttctcatttattacatctttgccattatttaattgtttcacctacctactttatccaatactcaaatttgattggttgaacaattggtcccaactttctctagactccttggtattccctttcccccactttctctctgtgtcacttattaaaaaatggaggacgtatattggaaaaaaattggaaggttttcttcacttatgaatagtggtaaaattagagatgggaaggctattttgggatggatggagtaatatttaaatttttaaaataatgtcattgttttagtgatgaaataaaattcaaggctattttttctagtaattatgttatctgtacatcaccacacgtatcgcgtgcatataagactagtttgatgatattccaacactgttcgaaggaagtcaggcatggaaccatgtttgcttccatatgggaaatattttgcttactctccttcaaacatctacctcattatcccagaatgattgatcgaatctaatacaaatatacaattgatcatatgccaccagggaattacatcaaattaaatttttatagaaggggaatcagtcatagcctcatagggaacgaataagtgatactcgccagtttctttcctggttacttttcctcttctcactagccatcctttatgtatgggtatgctgcatcattcctgccactggttgggactcccgtttgaactatggggggatgggaaagctaagccatcatcttcaaattgagtttcttgagaatgtaagacaccatctgtaagatgaatatagtgcactctatagtcaatgtcatgatctttatgggtttatctgctgaaataactgtgatatacccagctctccatttacaaagttttcctacatattaaactcttgcccgcaattctagaacttcattgtagaacttttcctacataagcatcatttgtcttttctgtagtaaaagttagaaagagctttattttagaacattcgtttttagttttctttgttgttgattactccgccacttttaatacttttatgattcaagtatttgacaaaatcatgtaatttaggtcctctgctgcatgcagtctataccctctctctctctctctctctctctctctctgtggttgtgtcttacttgttgagttactaactccagccattacataaagtaggctggcattatgatgagcaaattactcaagaccacatgttagctcctttttcttttctccttattctgaaaggcaaatataggtccatcttggtgcttctcatgtcataagtaagctgaccccctccttttccagggaataggacaataatccaaaagtgagggttttacatgttgggatttgtgaagtttcttattttacttaatagccgagtcagtgttacaatacatagtaccgtgttacaaaatagtatgtaacaccaagcatgtttatgtgcaaaattgtgcaagactttgttgctggcacgccaagggctgttttaatgtagtttacttattcttttaggtttttcagatgacaatcataaagggaattaggagtgtttttattgtagtcaatccctattgtgctacaacgataaaagaaaaaagcacaagactagaaggagaagtaatgtctaggaaagactcctcacctggggttgctagtcacctacacatcttagaaggcatcaaaccaaagcttattcccctcgactgttttcgggagaaaagaagacaaaattgtttctaacttatactttaccagtttcactacagcatcagaaagaagcaaaatatgctcccacaacacggcgaacctagctttccagatgtgataaaccagaccagcaaaatgattattttcactagagctttgagtctattttttcggtttttccccttcttcctggtaatgtcacgccaccaagccatcatctcaattttttgagatttgacgtaatcgctcaaatagctgagtaagacacttcttgctctaaatactaataaaaaagaggtgaatgtgggtctcagccatgttactcaaatcggataaagtgtctactcttattagggtttttgggtgttggactcatccatttttttttgtaaaatgtcaagattttggtttgaaatgagagattcaagtgtcgtgacatgagtcggcacgcaacacttaaacgtgtcgaagtaacagagggtctcagacaatcaactttaatcaatcacgaaccccaaaatttatgcaacctttgctcatattcagtctctgtaaagcactcaactgcagcacacccacccattcgcttcacctacagcaggagggcacccaagtaattgctatgatgagcgaattattctgttttgccttgctggaatattgctgttagatttgctgactcactggcagttaattatagtcagagaatgagaaatatcctgtagagagagaaagggtatcttttgtatttagctctataaatagctaaggaagggaagggcattgagagtttatgatattataataggagagatttagcctctcgaatgctgataggagcgtagctcttgttggattatcaatactactctgtttgctctatctatttctactcaggttccttcttgtacagtggatccctgattggatttacttcatcaaccagcagataaaattatttgtaggcacattgaaaccattccaaacctaatgaggccaaagtttatcacaaagaatataggagccaaatgtaggcaacagataagagtataattgccagaagttgaagactccaggtattgttcagaaaccttaatgcatatcatcattctgacactagattttccccggagccaactaacaaaaatgaattaaagagattaaggctatgtttagttcacctgaaattttctgatctgaacttatctgatctgatctgaacttattttttctgatctgatctgatctgatctgaaccaatctgattacaagatcttatcttttagatttttctcaatatataagaaaaaatatagtcatgtggggtcttgtttgattcgtctcaatgagtactttattaatattcaattattataatttttactaatatgtaatgaaagatataatgatttttaaatataagcatgatctgaactgatctgatgtgaacttattttttctgatctgatctgatctgattagatctgaaataagcaaaaataaggtgaactgaacatagcctaagcaacaattgagggaaaataagatcattatggctaagataagataaatatgtaatgataaaatcagagtaattatatcagttacactctcaacattcgtcagattgaggtttcctcccaaaatgccaacccacttttctgtattttcacgtccttctctctacccttctaggtatatattacatcagctgtaaaatttttgaaccaactagtagaatactgatctaccctcaactgcctcactttctcattttttctgggcctttttctctctagcacaagtccacataagtgatgcatagcagaaatataattccactagtcatcctcaatattgatataacaaacacatcacccacatattatcatttttaatcgctgcatgcgaggcatacttacccaccaatcaggatatgcataacagcgttcctaattccaaaaccaccatatatcttgggtttgcaactctcatccctagcaacaaggggactttctgaaaaagtggcagattccgcccacaagtagtttgtacggacacctttattatattattaatatcatatttcggcaacacaaattaccagcccagtaaaacatgaattgacatgagactaacaaggggcccaatctaatatcgtacgtctgtactaagcaatgtataaaaaaaagctcaaggtgcattgatgcaatagggatcctaatgtgcataggtgcgcctcattgaagtgaggcaccactaaggataaataaaaaagattgatgtaaaattaaattgtgcaccttgggtgcgcctcgatgaactttttttgtgtgcctaagtgtacctcaagtacgcctcattgatatcgcctcgcctggcagaaaacgagcttgaccccaatcgccttgctccccaccgcctaggcgtgcctcagtcacactttttaaatacattggtattaagtactcagaatggcaaaaagaaactttgggcattaattagacatttcactttttgtgcaactatttgtgacttcagagattgatatgttttctacattacagacttttgtgatggctgcatggtctccactgtcaaagaacattagtttaagtagaagaaatattgctctattaccttcctccctctacaaacaaaatcctaaaatgtggttatgtagtgccaattcaaacttgtagatgcatgactaatgctttcattatgctgtgggtttttatactatgattcatgtccaattacataacaattagctggagtcaggatatgtcacggaaattttaagcctggcaggatgattgtttatattttctctttttcggtgtttaagtcaaagtaaacttctaggctgctcttttataggctagttgggctgttggggagatctacacattaagtgtgaagaaatcttgtctaactccagtttggttgagaactgtaagctgtcataacatttgttgcatgatgaggccttgtgggattatcatgttagctgtaaactctaaacttacttgaaatctagtgttgtgtctccttatttctgtagtcaaaattgaaccttctgtacgtttttgatacctgcgactagaatgatggaattctgaattactgatactattacaaccatctgctaagaacgaagatgactcttagctaatttctcagcagatttagagaaattaagaagaattactaatgaatatttaaagagaaaactaccaagatatgattgtattgatgaaaaacaccaattacaacctaaccaacattcgagaggttggagctctcccaagtaaccatttctctcactaaacttatcaattttcaagatgccttttccattctcagttcctctatatttatactactccccttagcaaactacccaacttattccccaagtaaactaaagagataatatctaaaatacccttccccctacaataatattagttcttagcattaccggccccctaaacttccaccttgtcctcaaggtgggtcgtaatcatcactaaattctgggcctctactcgtatattcagtgtcttgcagcccttcaggccccaagcctaggttatgcagctcgtgttgcggctcctcctcatatagttctctggctggagtgagtgcctcaactataatgaaaaagtcctggaggtggggaaggaaggagtgtctgaaatggtgtggtgtgctgctggtgttatgggcttgtgcctgaaagttttgggtttaaagagatggagtggagaagagtggagaagtgactggagacgtaaaagaaggaatcataatttttgtaagtggtgggttgaaaaagttggtgggaagaattgtttttataaaatgtagtgtaatggtcgaaaaatgggtggagtaagtatggtttttggctggggatgtggtactgggttgaaaataaataggtctgagcttacttgtaaaattggcctcaacatgagcaggcccaatatcttgagccaattccccaaaagctggcaatagagcactcttaattgcattgttgtgggccatcgggctccaaacatatattcggaggagccggacttctttggtgatgtcattagcttggcccattgcacactttcccttaacagcctcaagatcttttcccacttttgtaccccaaccacgtggcttcaccatcctttctttcttgcttttgtcacttttttggcaatatacgagtttgtccttactaccctcatcttctaatgttggcttcctcaccaagcttaatttctggaattttgtccaccaaatcccaccacccatcgtcaacaccatacctatctacaccggccaagaagcctggtcctccacccgaattttcgccacagacaaagcctgaacaaccgtcagttctctcaccggagaagttcacaggtccaccacctgacccactagttgctgatccacccttcacaaatctccctcctctggctgccacaagtagtggttcctccgtaatactcatatttctcgtccaagagccctggaccaccaccggacccacttccaccggcaccaacttgttcaaatgatacttctctttcttttccaaacagcctacttggactggaaaaaccactgcgattgtagcctccgccagatctgtagcctagtgcacctaacgtgcttccaactgcaacccaatagggatggaaatggatgggattcggggagggtggagcatcacccgcatccgtcacccgcatccattcgctccacccgctccacccgcatccatccatccgtcacccacgggtgaaacgggtgggtcggtgataaacgggtggaaccatttagggggtgtttggtatcatgtttttttacaaaagaaacagaatcaagtaacaaaatccgtttctacttgtttggttctatgttgctcagactcgagtacccatgtccgacacgggtacgtgtccaagtgtccaactcagctattttctagaattttttatattttttaacccaaaacaaagtgtccaagtgtcccacccatgtccgactcccgaggatccgacacgggtacttgaggtgaaatgaagagtccgagcaacggaggtttggttagtgtgtaaagtaacaattaccgttacttgaggaaaacacatccccccaagttgtttccattcaaaaacctaaggaaacaaataacgtttcactcctcaaacaagaggaaagggaatgggttatatttatttccattccattaggataccaaacaactaataagggtaacacttattattatcctttcccctccttatcaaaatcctttccattccgtttacggtattcataccaaacacccccttagtatattttctaatgaaatttgtgatatgatatgcatgatataaaataattctatcaaaaatataaaaagtaagtaaacttacatgtacaacttaatagatgggtgatgggttggaggttaaacgagtgatggatcgggtgacgggtgaagaaattctcacccaccactcgctttccatccatttaaattaggtttttcatccatttaaaaaaccgggttaaacaggtgatgtatgatccatcacccatttccatcctcaaacacatcccgatttgtttactgcaccaccagatccaccagtataaccacccgaaaaatcatcatgccttctactagccttgtaacctgctcccggtgagaagcttcttccacaagtggtggtcgctggacctccatctccttcttccccaaaaaattttccatgacacccactcgacccttcatctgtgacaacctcttcttcgtccacctctgaagttttggggtcgtcttcctcctcaagctcctcttgaagtaactttaacttccgttggatgggagagaacgcttcattgattatcttcaccagatcttcttgaagtttctcgaaactttttctcacgttttcctctacctctttcgtgatttcctttccgatctccttcatttttagactaggagctcttgcgattccatggcagatttctttttttaaaacaagaaaatcaggcacttaatctcccagaatagtggtgctctgataccattttctaagaaccaagatgactcttagctaatttctcagcataacaacaaatttagagaaattaagaagaattactaatgaatatttaaagagaaaactactaagatatgattgtattgatgaaaaacaccgattacaacctaaccaagaggttggagctctcccaagtaaccatttctctcactaaacttatcaattttcaagatgccgtttactactccccttagcaaactacccaacttattccccaataaactaaagagataatatctaaaatacccttccccctacaatattagttcttagcaccatcaaactgggatggatggttttgtaaggttccaatttacttctccatcaaaatattttaggattttttatctcatgtattttagagtttcctcgtccctttttatctgataagattcttctgatgatttgattttatggtaggctccaatcagcaatattaaagaactgaagattctgaaagctggagttccattttcacttgacttcattccagaggtttgtatttttatagtggttagacatgcttcccctagttttcaaagtaaaagcatccttgttgtgacgatattttttcccttgtttttgtttttattattatcatcacttatttccattttctattttccatgctgataagatgttcatcaccataatcttgtggtatcagaagtgtttagtggagtttattcactacacatgcagttgttcttttgccatgaccgccattcattttctcgtcaaaacaaatctatgaagtttggttttcagactcatggttcttgtagctcttgtgaatttttttttcttctccttgcatgcattcttcaaattacatattgcatataccaggtgctctcctttattttatatttaatttttaaaattctatcatatattttttaatgtcaaacctcaaactaggggttcactgcatcttaggcttaccaggctaatatttctttacttaaccttttccctttatatttgctatcctcttgtgtagtaatcaccataagaagggtacaaactaaattaccctcccattcttttgtatcattctgaaatagtgtcacagagctttgatttttttgccctcatttaatctggcaaatgttctctctatttttttttttttactttcttttgacgggattctcaggcaattgttacggggagcagccagtcacactgtttctgtttattatgcaggtgagttacctgcccctctctgttatgattactgcgtttaagaagaccagcgttacaagacctcttgagggcttcggagttcttatcccttcgaatgagcaacataatggactgaagactctcggtaattgtctggttcacgtgtgtagcgaatcagattttcaaaccctgatttcgtaacattgcaggtactctgttttcatctatgatgtttccagatcgtgctttctccgatatgtatctctatactaccctngttggaggaagcagaaatagagaacttgcaaaagcttcaacgtatgagatatgcaatgttttaaatgtatgctatagtcatcgtttcaaccttttggtgcctttttcttactaatttatcctcctggtttaatgatcttagggatgaattggagcaaatagtttcgtctgatctccaccagctgttgggcactgagggaaaacctacttttgtgaagtattgatatctttcacccaacttaacatgatttgtgcttataatatgttaaataaagtaactgaaatcctgaaattaagactacgaaactgtatggtgacagtcatttttactggaacaatgcattccctttatatgggcacaattacgactcagttctgagagcaatagaaaagatggaaagagatcttcctggacttttttacgcaggtaatctgtcatttgcttgttgcgataaagttcatgtacagttggcatatcaatcaacttgcattctttcttgctaactccaaacaatcaggatcattaacttgtaggctgcagcaacagagagtatctcccaagttgttaggtttcatgtaacctcgtcgctgagatgaaatttccgttggctaaaaagtgaaagttttgtattgatgttacccaaaacaaaagtattttgcatgttgcttgaagttttggttgtttcagatagtacatcctttgacatgaaaataaatggaaaagcgtatgtcaagcaattatcatctagtttctttgtttctagatactagccgcatttgatcccagatcatttttgaggaagtcagctgaaataccgtagctatccttcagttttcataataaaactttaatggatctgatgtacagtaatttagtgtgcaccgggttaataattgatattaacttcatatagtgagtcttataaagatataatgaacttatatacaatatagtggattttattaatggaaaacatatagtgaaactatatgcaatatagtatgatacataaagacttagacaacaagagcattcgaaattacaaagaacaaaggaaagaacaattgtatcaaaccggttcgaatgaacaaacaaccaccacttccacaatcaatgtaccaccaatcaagactaaactataacaatgagcttctagtttaagtctactttgagttttaatcaccaattcaacgattagatgatcaaaattgcaaaggttaagagttggtcaaacctaaccaagagttacactaggcacatagctttgttaggagtatattagtttatgaattctagttaagttagaaatccaatacctagttggattaggattcctaattggattagaattatagtttagttagaattctagtaatagtaggcgtgtgattaggagatataattagcttaattcttatattgttagtttaattcttatcctcgttttaggtttatctttagtcgaacttgtaccctatataaggggcctttatttcattaataatatagtttattttgagtttaaacctttacttgtgattgtttgcttgagaggttattaatcgaaccattaataacttttcaggattgttaagtttttagtgttaaacatcttaatttcaggagtgattttaagagtgtttagattcttgtattcaagtttcaggactgatcttgaatcaagaaatatccctagtttcgactaatatcataagtagttcgaattcttggagtcttttcttcaagattcatattcataacttgattatttagacttcttggttttgtaatcatatcaagtggtatcagttttccagggaggagaggatacaaagggttctctttgatcaaagaagatccaagggcatcaataagaatgacacttgcaataagttcgagtgatacaaacaacttcaagactcgatcttttgctaccaagaaccaatcttgacgcctgaagattgttaggacaaaggataagaagtgtttctacatccaagattgcattctttacgtccaagattgcgtcaagatccattctttaagttcaagaaaggagtagaaagcattcgaacactacttaaacatgacatccgagatggataagctggctatggccatgagtgccttggcacaatcacaaactgagtcacgcaaccacatgggtaggatggaggcacgtgaccgtggattgaaactagatgactatagtggagatggcaatccagaagacttgttggagtggatttgccaactaggcaaagtgagtgattataggggctttgatcacaagaagagattcaaggttgcttccattaggctcacgaagtatgctggaatacggctcgaaggattgcatgcacaaacttcttgcctaatgactatgaacaaaaacagttcataaggctcgcatcaataagccaaaacacacttagtgtacacgaatacagcatggagtttgacaaattagggcttatatgtgacatagaagagaaagagcaatacaagattgcaatgtacattaaagggttgaatcgatatatagccaagaagatcgaagtctcaacttatcacttctttgaggatgtgactaaattggctaagaaattcgaagagcatgacaaagaagaagggcctaagagttcttacacacctaagtatgactctagtgctaaagggaaatcaacagttccctactcaaggtggtcggaaagacctaagaaccccactacacctaaggaggacactagcatggagaagacaaaagtggccgtacctaaggagagtttaattttgtgttttatacatctttgcttaagagcttaacaattgaaactattaataacttttcaggatggttaagtttttagtgttaaacatcttaatttcaggagtgattttaagagtatttagattcttgtattcaagtttcaggagtgatcttgaatcaagaaatatccccttgttcaactattataattgatcttattcgagttcttggagttaatttcttcaagattcatattcatacttgattattagacttcttggtttagtaatcatatcaatatcattagcattaatttacccccagggagattaagaaaggattagcctaatcaaggcgcttaagaagtttttaggaaaaatcgtgcttgttaagcttaagaattgaacttctttcaccatttgcccttgattctcttgttgaactagaagatcttggttcatagtagatgctcctgcatcatagtagagcatttaattttaattttttaacatgcacgaagatgtaggtagtgtagtatatatcgtgagacgtggtttaacatatagaaagatgtagtttctgcatgatatagtgagtttttgcatgatatagtgaatgtctgaatgatacagtggatcgttccgaattgttgtagtttgtatgatatagtatttttgtgaatgatatagtgagtttcttcatgatacaatgggtttctgaatgatatagtggattgcttagaaatgatatagtgagcttttgtatcatgtagtaggtttctatgtgatataggttgttaaaagatgatacatgcttttggcctcatgtactctaatgttaacgtgaacccggtccttgcaagtcaattgcagttttttcaatattaagctatttttttttttttttttttttttttttttttttttttgtacgggaatatttagcatctttaccacaaacataaccatacgaatattatgcggaaattccagtctgaagtcttaacttttcaaaattaaaagcttctatattatttttggaatgaaaaaaaatgagctatggcatgttattttgaaatacaatgagtctcaaggtgcatagtggcttcaattctacgaataatgaatggactactgatttctaattttttgttccgggcttttgcattaggtaaccataaagatggactctctgtgggaagaactatttcctctggatacaaagctgcggagcttgtgatatcctatctcaactctacttaagatgcctaaatgatcgaggagactccgtaagtcctttctctgattctatctttgaactgagtggaaacacgactgtggtctaaagtagttgatgtctcagatatccagaaatggcgttagtgatattcaggagctgtccattgaccctttgattcattgttgcagtttactgaaagttgttagctggtctcagaaaaacgaaaggaaaaaagggggaaaacaaaaacaaagaaacgtagattgtggtgttaaaatcaagaattccagagatttgtaccttctttatcagttgaattgtttacagtgtgaatcaagaagttagctcgaccttcttttcttgtgaatggtaagatttcgtgatcatcaatacttgattgtgctgtttgcaacttcaacggtaagatttcctgatcttacagtttaattgcttgtgctgtttgccactt

SEQ ID NO: 32 - DNA, 1575 bp, synthetic construct
  misc_feature 1..1575: note = F420L mutated Beta vulgaris PPO2
  variation 1260: note = n is any nucleotide
  source 1..1575: mol_type = other DNA
atggtaatgctatacgattctcacctctcaggagtctcaactcatcttcaactatcgcaggcatttcccaggaagaacccattaatggccaaagtgtctgagccgggtaaacccacttctgctaaaaggattgctgttgttggtgctggtgttagtggacttgctgccgcatataagctaaagtcccatggcttgagtgtgacattgtttgaagctgatactagagctggaggaaaactcaaaactgttgcaaaggatggtttgatttgggatgagggggcaaatactatgatagagagtgaagcggaggtcacgagtttactcgatgatcttgggcttcgtgagaagcagcagtttccaattgcacaaaacaaaagatacattgcgagagacggtcgtcctgtgctgataccttcgagtcccattgcacttctcaagagcaatatcctttcagcgcaatctaagctacaacttatgttggagccattcctttggagaaaacgctatgcttctaagatttctgatgagcatgctcaggaaagtgtgggtgagttttttgagcgacattttgggaaagagtttgttgattatctaattgatccttttgtcgcgggtacaagtggaggagatcctcagtctctttctatgcgtcatgcatttccagaagtatggaatattgagaacaagtttggctcactaatttccggattaattcaatctaaactgtctccaaagaaggaaaagggtggaggaggaaagccttcttctaatgaaaagacacgcatacgtggttcgttttctttccagggtggaatgcagacacttgttgacacaatatgcaatcagtttggtaaagatgaactcaaactacagtgcaaggtcctttcattgtcctacagtcataaggggatcccttcttcagaaaattgggtcgtgtcttctgtgtcaaaaaattccattgaagatcaacaatatgatgctgtcatcgttaccgctccaatcagcaatattaaagaactgaagattctgaaagctggagttccattttcacttgacttcattccagaggtgagttacctgcccctctctgttatgattactgcgtttaagaagaccagcgttacaagacctcttgagggcttcggagttcttatcccttcgaatgagcaacataatggactgaagactctcggtactctgttttcatctatgatgtttccagatcgtgctttctccgatatgtatctctatactaccctngttggaggaagcagaaatagagaacttgcaaaagcttcaacggatgaattggagcaaatagtttcgtctgatctccaccagctgttgggcactgagggaaaacctacttttgtgaatcatttttactggaacaatgcattccctttatatgggcacaattacgactcagttctgagagcaatagaaaagatggaaagagatcttcctggacttttttacgcaggtaaccataaagatggactctctgtgggaagaactatttcctctggatacaaagctgcggagcttgtgatatcctatctcaactctacttaa

SEQ ID NO: 33 - protein, 524 aa, synthetic construct
  REGION 1..524: note = F420L mutant protein of Beta vulgaris PPO2
MVMLYDSHLSGVSTHLQLSQAFPRKNPLMAKVSEPGKPTSAKRIAVVGAGVSGLAAAYKLKSHGLSVTLFEADTRAGGKLKTVAKDGLIWDEGANTMIESEAEVTSLLDDLGLREKQQFPIAQNKRYIARDGRPVLIPSSPIALLKSNILSAQSKLQLMLEPFLWRKRYASKISDEHAQESVGEFFERHFGKEFVDYLIDPFVAGTSGGDPQSLSMRHAFPEVWNIENKFGSLISGLIQSKLSPKKEKGGGGKPSSNEKTRIRGSFSFQGGMQTLVDTICNQFGKDELKLQCKVLSLSYSHKGIPSSENWVVSSVSKNSIEDQQYDAVIVTAPISNIKELKILKAGVPFSLDFIPEVSYLPLSVMITAFKKTSVTRPLEGFGVLIPSNEQHNGLKTLGTLFSSMMFPDRAFSDMYLYTTLVGGSRNRELAKASTDELEQIVSSDLHQLLGTEGKPTFVNHFYWNNAFPLYGHNYDSVLRAIEKMERDLPGLFYAGNHKDGLSVGRTISSGYKAAELVISYLNST

SEQ ID NO: 34 - DNA, 4272 bp, synthetic construct
  misc_feature 1..4272: note = codon optimized Cpf1
  source 1..4272: mol_type = other DNA
atggattacaaggaccacgacggggattacaaggaccacgacattgattacaaggatgatgatgacaagatggctccgaagaagaagaggaaggttggcatccacggggtgccagctgctgacaagaagtactcgatcggcctcgatattgggactaactctgttggctgggccgtgatcaccgacgagtacaaggtgccctcaaagaagttcaaggtcctgggcaacaccgatcggcattccatcaagaagaatctcattggcgctctcctgttcgacagcggcgagacggctgaggctacgcggctcaagcgcaccgcccgcaggcggtacacgcgcaggaagaatcgcatctgctacctgcaggagattttctccaacgagatggcgaaggttgacgattctttcttccacaggctggaggagtcattcctcgtggaggaggataagaagcacgagcggcatccaatcttcggcaacattgtcgacgaggttgcctaccacgagaagtaccctacgatctaccatctgcggaagaagctcgtggactccacagataaggcggacctccgcctgatctacctcgctctggcccacatgattaagttcaggggccatttcctgatcgagggggatctcaacccggacaatagcgatgttgacaagctgttcatccagctcgtgcagacgtacaaccagctcttcgaggagaaccccattaatgcgtcaggcgtcgacgcgaaggctatcctgtccgctaggctctcgaagtctcggcgcctcgagaacctgatcgcccagctgccgggcgagaagaagaacggcctgttcgggaatctcattgcgctcagcctggggctcacgcccaacttcaagtcgaatttcgatctcgctgaggacgccaagctgcagctctccaaggacacatacgacgatgacctggataacctcctggcccagatcggcgatcagtacgcggacctgttcctcgctgccaagaatctgtcggacgccatcctcctgtctgatattctcagggtgaacaccgagattacgaaggctccgctctcagcctccatgatcaagcgctacgacgagcaccatcaggatctgaccctcctgaaggcgctggtcaggcagcagctccccgagaagtacaaggagatcttcttcgatcagtcgaagaacggctacgctgggtacattgacggcggggcctctcaggaggagttctacaagttcatcaagccgattctggagaagatggacggcacggaggagctgctggtgaagctcaatcgcgaggacctcctgaggaagcagcggacattcgataacggcagcatcccacaccagattcatctcggggagctgcacgctatcctgaggaggcaggaggacttctaccctttcctcaaggataaccgcgagaagatcgagaagattctgactttcaggatcccgtactacgtcggcccactcgctaggggcaactcccgcttcgcttggatgacccgcaagtcagaggagacgatcacgccgtggaacttcgaggaggtggtcgacaagggcgctagcgctcagtcgttcatcgagaggatgacgaatttcgacaagaacctgccaaatgagaaggtgctccctaagcactcgctcctgtacgagtacttcacagtctacaacgagctgactaaggtgaagtatgtgaccgagggcatgaggaagccggctttcctgtctggggagcagaagaaggccatcgtggacctcctgttcaagaccaaccggaaggtcacggttaagcagctcaaggaggactacttcaagaagattgagtgcttcgattcggtcgagatctctggcgttgaggaccgcttcaacgcctccctggggacctaccacgatctcctgaagatcattaaggataaggacttcctggacaacgaggagaatgaggatatcctcgaggacattgtgctgacactcactctgttcgaggaccgggagatgatcgaggagcgcctgaagacttacgcccatctcttcgatgacaaggtcatgaagcagctcaagaggaggaggtacaccggctgggggaggctgagcaggaagctcatcaacggcattcgggacaagcagtccgggaagacgatcctcgacttcctgaagagcgatggcttcgcgaaccgcaatttcatgcagctgattcacgatgacagcctcacattcaaggaggatatccagaaggctcaggtgagcggccagggggactcgctgcacgagcatatcgcgaacctcgctggctcgccagctatcaagaaggggattctgcagaccgtgaaggttgtggacgagctggtgaaggtcatgggcaggcacaagcctgagaacatcgtcattgagatggcccgggagaatcagaccacgcagaagggccagaagaactcacgcgagaggatgaagaggatcgaggagggcattaaggagctggggtcccagatcctcaaggagcacccggtggagaacacgcagctgcagaatgagaagctctacctgtactacctccagaatggccgcgatatgtatgtggaccaggagctggatattaacaggctcagcgattacgacgtcgatcatatcgttccacagtcattcctgaaggatgactccattgacaacaaggtcctcaccaggtcggacaagaaccggggcaagtctgataatgttccttcagaggaggtcgttaagaagatgaagaactactggcgccagctcctgaatgccaagctgatcacgcagcggaagttcgataacctcacaaaggctgagaggggcgggctctctgagctggacaaggcgggcttcatcaagaggcagctggtcgagacacggcagatcactaagcacgttgcgcagattctcgactcacggatgaacactaagtacgatgagaatgacaagctgatccgcgaggtgaaggtcatcaccctgaagtcaaagctcgtctccgacttcaggaaggatttccagttctacaaggttcgggagatcaacaattaccaccatgcccatgacgcgtacctgaacgcggtggtcggcacagctctgatcaagaagtacccaaagctcgagagcgagttcgtgtacggggactacaaggtttacgatgtgaggaagatgatcgccaagtcggagcaggagattggcaaggctaccgccaagtacttcttctactctaacattatgaatttcttcaagacagagatcactctggccaatggcgagatccggaagcgccccctcatcgagacgaacggcgagacgggggagatcgtgtgggacaagggcagggatttcgcgaccgtcaggaaggttctctccatgccacaagtgaatatcgtcaagaagacagaggtccagactggcgggttctctaaggagtcaattctgcctaagcggaacagcgacaagctcatcgcccgcaagaaggactgggatccgaagaagtacggcgggttcgacagccccactgtggcctactcggtcctggttgtggcgaaggttgagaagggcaagtccaagaagctcaagagcgtgaaggagctgctggggatcacgattatggagcgctccagcttcgagaagaacccgatcgatttcctggaggcgaagggctacaaggaggtgaagaaggacctgatcattaagctccccaagtactcactcttcgagctggagaacggcaggaagcggatgctggcttccgctggcgagctgcagaaggggaacgagctggctctgccgtccaagtatgtgaacttcctctacctggcctcccactacgagaagctcaagggcagccccgaggacaacgagcagaagcagctgttcgtcgagcagcacaagcattacctcgacgagatcattgagcagatttccgagttctccaagcgcgtgatcctggccgacgcgaatctggataaggtcctctccgcgtacaacaagcaccgcgacaagccaatcagggagcaggctgagaatatcattcatctcttcaccctgacgaacctcggcgcccctgctgctttcaagtacttcgacacaactatcgatcgcaagaggtacacaagcactaaggaggtcctggacgcgaccctcatccaccagtcgattaccggcctctacgagacgcgcatcgacctgtctcagctcgggggcgacaagcggccagcggcgacgaagaaggcggggcaggcgaagaagaagaagtga

SEQ ID NO: 35 - DNA, 37009 bp, synthetic construct
  misc_feature 1..37009: note = L397E mutated Beta vulgaris PPO2
  source 1..37009: mol_type = other DNA
tattccatcgaatgtagcaaattgactgtccgttgcaatttcggagtttccactcgtcgcatggtaaatggtaatgctatacgattctcacctctcaggagtctcaactcatcttcaactatcgcaggcatttcccaggaagaacccattaatggccaaagtgtctgagccgggtaaacccagtaagtcaaacattcgaatcacaactcaagcaaatttgtcttgtttgcgttatattttgctcatttcagccttttttgtttttccgacctttgcatactgaatattgtgtgtgtgtgtgtgtggggtttcagcttctgctaaaaggattgctgttgttggtgctggtgttaggtaaattttcgtctcttgcagagtttttgagtcatttgggaattctatgtgaaacttgtaactcccttcagtccaacgaacgcagtacaattttctatcaaatcatggtcctaatttccaattttccatatatattgttggaattatattgggattgtctatcactattaatagtattaggatcaattgtagagaagcacagaaatttttgggatcgaaagaatatctggattgccacattaacagcagatataattcttccaattggtttttggttcttcctaccttgacttgtctggtcaaacattataaactttaacctttaatatccattaaagtaaactataggatttttttgtctaaaacatgcttatataacatgaaatttgtgagaaaccaccttatatatatttttttgcgaaaacaaaccttaaacaaaattattatcgtgagaacaaaccttatgccaatttcgatcattgacccaaggttttggcattgaccgtgtcatgaattttgttgggtttaaaaagtcatgtgtcttgcatacgaaatggtaaatgcgggaaccttgggtcaatgtttggaatccgcataaggtttgttctcccaaaaaatgtttttgttcaaggtttgtttttgcaaaaaaacttatataaggtgctttctcagaaatttcatgttttataaagtagtatttgacaaaaaaccctaaaatatattatagaattattattgactaaattgtgtaaaaatgtactcttctaaaagtacattatagtattttagtggaacatttgcgagaaactactttataaatacgatttttgcgagaaatttcctaataaaaaaatgtgaagtgcaaaactatcttattgataattttctactccctcaaatccaaaatactatgaagtctttcctttctggtttgtcccagattagtttgtacgcttccatctttggtatgatcccacttttattatacttattagttttacgtgagttccttactctatctcttttaacaaaaatactcaactatctctatccaataaaaagttccttactagtcctatcacatctgctttttaataaaataacgtttgataaccacacaacttatatccttaaaatacacgttcaaccaagtgttgagattaatttggacggagggaataaatattttttgaggcatattggtagcagtattcggattccgataggttgactatgtttccaatgttgaccaacacttgccttgcatgtaattctaactttgctcttttttattcttcatttccctcgtattccatatacaatgtttagagacccattccttcctcttctcttctttcccttccttactatgctttgccataatcttcctcaaatgagtgcaaattaatttgtcgttgatgtaggccaactgattgtagcacatcttcatagttcatacctcaacacactcgtaattatattataccctacatgttaaatggctcatgaagctttattttatatcatacttcctccgtttcacaataagtgtaacacttttcttatttggaataatcacaataagtgaaaccaagctccaaatggtaagaaaagttcactcttattacaaatataccaccaaaaagtaagaggggatcacaacttcaatacttcttcactctactttattgtggtcccaactttctctctctaaattccttggtaactccccactttctctatgtttcacttatggtgaaatggaggaagtattttgtagtggtatttagctactaggccttggatgatatacaatcatacaatgtatttatattcacgataatttgctgcccaccttgattaccatgatttccaccaattttatcaatttcagtacttcaccaccccgaatttatattttttatttccaaccttggtatctccatttgtctgagtgcccgatccatttgtatcgcctccagaattgaagaagcttcctgcagctagacaattaggaaggttaaaaaagtttggagatggtggaggatagccataataatcattgttgggaggtggaacttggaaggttattgtagggttgaagtccttgatgaagaagaattgagttcaaatgagaggaaaaaggagcagggaagagggacaataagaaaaaaaagggtaaactaaaatcacgtgtaaggcatgtgcagatcaacatcagaaagcatagtcaacctactggtattagggcactgatacctttttgggtcaaaatttttttacaaggtatttcatgaggtagttttgtccatttttttttttacaaggtatcgtctcattttttttttatcatttagtttctcgcaataagtgtatttcatgaggtagttttttccaaaatttcctcatttattataaaatacctcatcttttccataaataatgcaatgtctagacttttacgctgtttacacatgctcctttgaccatctattgacacacaaggaaaaatagagtagagtcatgcaggatcttgttagatttttctcgatatatactttcaaaagatcaatttttttataattttttttttgaggggattttttttttataattatgtacttatcaaaggtcaaagttgtgcaccgggaagcataaaactctatgtgttgcaatttacatggaaggggaggagtataataagagaaaattatggtaaaaggttcattcctggagatcatgagaaaggaagtagaaagaacaaaaaagaacaatgggagtgcttttcaatgtttgttgtacgtagcatttattcatttgctataatgttttgtgacattgtagtggacttgctgccgcatataagctaaagtcccatggcttgagtgtgacattgtttgaagctgatactagagctggaggaaaactcaaaactgttgcaaaggatggtttgatttgggatgagggggcaaatactatggtaatgtttttgattattgcaggtcttgcactttagcgcacaattaatttctggatttttttttgtactgtggtggttatggtcatcaacatgtctcacccactgtgcttgcagatagagagtgaagcggaggtcacgagtttactcgatgatcttgggcttcgtgagaagcagcagtttgtaagtctttcattatctgaatggcacatactttatttcgaaagattgtaattgccttttctttctagatggcttcatcttcatgttgctttctgattcagtttcgtggctaactttccaagtttgtctgattgctaactctgtcatagccaattgcacaaaacaaaagatacattgcgagagacggtcgtcctgtgctggtaagtttgcttgttttacttttgacctcttttaagatctttcaactctggagcctggaaacatggtgatgcaggaggcaagttctctctattttacatcctttcttctctgtatcttatgacatttgcctcttattctgtgcagataccttcgagtcccattgcacttctcaagagcaatatcctttcagcgcaatctaaggtcgttttatgttaagacatacttgatgctgagagtttattgaattcttaaccttcttcttattttttttttatttttttagcaaaaggtaagtatattgcatttaccaaaaaacagtatgtacaccaccacagcagccatgtcagaatctagaaataccaccgaaaaaatcctacacccaaccagagacagttatattatatcctactcctaagtttctgtacccaatttacatcaatattggtccatttacaagatatttttataattcacagaagcacatcagttttaattagtttaataatgacctctggatgaataaccaactcagaccatatagccttattcctggctttccggaagttgtacgccagagcagcaagcacagcaatgcaaacctgtttcttatacctccttttatgtgtcttagcccatctcttatagctagtgaagatacagtcgtgtgcacaggattgaaccccaatccaactagcgaaagcctcacaacattatgactataaatacatctgaagtataaatgctgcacctttttctcctcttgcctgcacggtatcagaacaaatcccagctttagctaacaattccctggttttcagtttattcaatgccatcatgcaagcaatgaaagaatgttttggaacattcagtttgttccaaacacagtgagagcaagggacctttcctgcagttccacttagccacttatatccctgactaatagtatgactctttgcaccgtaaattgatttcaacttaactttttcataagcagtgaattgtgtgttgttagagtgtctagctgtctaggagattgggagaaaaggagggaccaaggagatagaaacacacctttgtgtttctttgtgtatttactttttagggtgggtcacgttttctgagaaatttgggaaaaggaagaaatagtaacacactttcccatttgtataacctgtatactggagctccaatataatttgcatttttttttgagctgcaagaatatgttgacaaacagttattgcttcttcctcagctacaacttatgttggagccattcctttggagaaaacgctatgcttctaagatttctgatgagcatgctcaggaaaggtaatgtcaagacatgtgttacctcgccttaattttcgttccaggaggtgagcatgcatttagaactaaaaggcacaaagactgttggtggtcttgcctgttcaaatataatggagaggagttttcgctacatttaccctctcttgaagtggggttgaaatatagcatcaagttgaatgcttgattaagtttaaaggacttgtgtaactctttttctgtttactgtgattacatgacctggttgattaacataatggtctgtttatctgtagtgtgggtgagttttttgagcgacattttgggaaagaggtaatggtttaccatagtatttctgctttagtggtaaattgtaatgttgctgataattatacttcgctgcagtttgttgattatctaattgatccttttgtcgcgggtacaagtggaggagatcctcagtctctttctgtaagtgaacattttgtgcttcactcccaattttttggaggctggaaatagattcttttccagttgttctgtcaaaaatagatgtagctttattttgaatttgaagttcccaattgttcattttgactattactgattattgctaagagtggcattatgctattatgctcctaaaagaaaggtgaattttgacctacatatagtataatgtatcaatattggtttaattgtttgttcttttgttccttttggtgctcatcttgcgccttgttctcatcgctcgttttttcatgttgcacttgatttaaatttgctcagcttaacttgtctttttgaatttatattacttattgctatattttactaatttcgttgaaactaattttttgctgaacttttcgttttgttgaaatcatttttctgaattaacttgattttcctgaatagaattgaattttggtgatcttaccttttctgcagccttttatttctttcttgtcctttttccaatctcatttttttatatttccattgtgttgacatcttatcattaactgtgcagatgcgtcatgcatttccagaagtatggaatattgagaacaagtatggaccataagacgtttattttaatcgacatgtatgtttcttagtttatacatatattaattctgtggtaaaaaaaccgaacaagaatatctttttttttttctatcatcaaaaagggtgaatatatgtagaggaaaaagatttgaatcaagatattagcctaaagcaataataatgttagtaatagctttaataacaaattcaaaacgtacattaatgaaccgagaggccggaaaatagttaaagtgaccactaagagaagcgaaggattcatgatgggttttcaacccagtagggcaaatttgttcaatgttctttacaaatcaagcttattaccttgtgggtgtttttgctagagatgaatgatagaattttccctagttggaagtcttttttggttactttatgggagctagtgatgtaatttgtttcgccttatggcatttcctaacatgtgcttttgtgatgtattgaagctttttttttgccttaatttatgctggattttaattttgttctttgtttcatttttcttgcttttgaaaaaaatatatagatatgtatatattaggattggtcgaggattttgagggaagggaaagacctaagaaaacttggatgagggtgattgatagtgatatgagtctatttgggatcgaagaaaatattcctttggataaggtgtagtggagggttgagggagcaaatttatgcagattagcttgacttaaagtttttctttttgattatttttcatttacttgtgttttgcaaacatttactcatgaatgatgtaaacttcttcaaccaaatctctggaaaaaaataatctacatggaaaaaacattattaatgttaacttgacagagatcccatccttgtgaagcagctagcaattaggcatctaacaattgacattttaatggacaggatagaatgtctcttgatagtcaataccctctgtttcattgtatcccatagctactaatctagtttgtatctttccaaagaaccattattttgaagtttcaccttgaacacccattttgaaccaatatgtttcttgcccttggggagaggggctaattgccatgttttgatgcggatgcaaagacacttgttctacctgagcctattgacttgatcatggatactctagggtttgaactcaagggaaagaatcaagtcttggcatgtgtggtgacatggcgtggggatggagtaaagaagagtcatagttctgttaggatatgttcttgcttgctacatagaatcgtagttctgttaggattgctatgatattatatctagtagatagattttatagttaattaggataaacatgtgatgatcatgttataataggcatgtgattagaggataggattagcttaattcttatcttgttgttagtttaattcttatcctagttttatgtttatcttagtcgaagttgtagccatataaagggcgttccattcattaataatacttagttttgctttgtgttttaaacatacttcttgattattgtttgcttgtgagctaactaatcaaaccattaaagacttttcaggagttttagtgctaaacatcttaatttcaggagtgattttaagagcgtttagtgatcttgaatcaagaaatatccttgttcttgttcgactaatatcagtggttttgttcgagttcttggagttaatctcttcaagattcttattcaacttgattgttgagcttattggtttagtaatcatatcaagtggtatcagttttccagggaggagaggatagataggattctctttgatcaacaaagatccaagggctatcaacaaggttcaaacattgctgcttgttcaagacttgatctttttctaccaagatgcattctttacgtcacaaggtagtaataacaagattaagagtggtttttacatccaagaatcaatctttcacgtccaagatttcatctttcacgtctaagattcattctttaagatcaagaaagttataacaagcatagaagaacacataaccatggagtccgagatggacaagcttgccaaagctatgcaagcacttgcaaagtcgcaaactgaatcacagagtcgactcaatgagaatactaccacaatcaatgggattggtagtaacatgaataggttggaggcacgcatggatgccattgcaaccatcatacaaaagaagcttgatcggaatagtgccaacttcataggtgccaattcagaggaagagttggcagaacgtgaagaaagatcatccaagactacatacaatgatgatcgtggcttaaagttggatgactataatggagatagcaatcgagaagacttgttacagtggattcgacaacttgagaaggtatgtgattatagaggctttgatgacaagaaaagattcaggattgcctccataagactcacgaaatatgctggaatttggcttgaaagcttcaaggcacaacgagccaagaaaggtaaagaaaagttgtgtagttggacaaagttgaaagttcaagcttaaagagaagttcttgcctagtgactatgaacaaaaatagttcataagactctctactataagccaagacacgcttagtgtacatgagtacaccatggaatttgacaagctagggcttatatttgacatagaggagaaagaacaatggaagattgcaagatacatcaaaggcttgaaccgccacattgccaagaaggtggaagtatccacttatcacacctttgaggatgtgacaaagttggctaagaagtttgaagaacatgagaaggaagagaagcctaagagttcttacacgcctaagtatgatactaatgctaaggccaaggctagcttcctactcaaagtggtatgaaggacctaagaggctaagaacctcaccccacctaaagaagacacaagagttgagaagcctaaagtcgtcgttccaaaggagaaatttgaagagatgagaaagtgcttcaagtgtcaaggaaggagacacatagcaagcaattgtcctaacaaaagagtcctcaccatgagacaatacctagctttgcaagaagaggaggatgtctattagttcgtccctgatgaagagcaaacttaggggaagaagaggaggaggatgcttttgctgaggatgatgcaaggctagtaggggtcaagaggcgcaccttacatgtcgaccatacacctagcatggagcaaatggaaaaatcttttccacactagatgcaaggtaggtgactatatatgtaatggtataatagatagtggttcttgcactaatgttattgtatctgaggtagtgtcaaagctaaacttagctacaagggcacaccctaagccatacaagttgagtttgctagatgatagcactggcatgagagtaaagaaacaagctttgatttcattctctataggggttataaggatgagttatggggtgatgtattgcctatgagtgcatgtcatctcttgcttggaagaccattgcagtttgataaaaaggtcatccatgagggggactctaatgtgtactctgtgttggttggttctaagagggtatgtttgcatcccttagctcctcattcagtggcgccaaagcaaccacctaagacaccaagttactttctatcttcaagggagttcgaacaagaggtggaggaagaaggttgtgcttatgccttgattgtaagacatgctgccacaagtgtcaagactactagcaatgagaagctcgaagccttgatgaaagagtttgaggatgtctttctagaggaactacgacccttgagaggcatagaacatgctgtagaccttgtacctggcgcccctttgcctaacaagcctgcttataagtgtgatccagtggcatctagggaattgcaacgccaaattgaggacctaattgaaaagggctatttaagggagatcatgagtccatgtgttgtgccagctttactagttcctaagaaagatgacacatggaggatgtgcatagatagtagagcagtgaacaacattacagtcaagtaaaggtttcctatgcctagattggaagatatgttggataagttacatggggcatcaatcttttctaagattgatcttcgaagtggctaccaccaaatgaggatcagagaaggtgatgagtggaaaacaacattcaagaccaagcagggattgtatgagtggatggtgatgccatttgccttatgcaatgcgccaagctctttcatgagcttgatgaatgaggtacttcgtccgttccttaacaagtttgtggttgtttacatagatgatatacatatctatagccaaaatgtggaggaacacttgttgaacttgcgtagcttattcatgaagcttagagagcaccaactctatggtaagattgatggcgacgaggttgacgggggattatggcggcagtgaatcaccctctttgccggtcactgaaatacaacctgaggtatctttaaattctgtaattggattgactaacccaaaaactatgaaattgctgggaaaaattgctggatgtgaagttgtggtgatgattgaccctggggcaacccataattttttatcactagctactgttgagaaattagctattcctgtgtcggaatcggaaggatttggggtttctctaggggatggacaggcggtgaggggtagtggaatttgtagaggggtgttattgagtttaaatggtggagttgaagtggaaacagattttcagcctctgggtcttggtaattcggacgtgattttgggtgtacagtggctggagacgttggggacagtggagagcaattggaaaacacaaacaatggggtttgaaatcgagggtgtcaagttcactttgaaggtgacccatcactggcgaggtctcgaatctcactcaaagccatgatacgtaccttatgtaaagagggtggaggtttgtggcttgagttgaaccagattgagcattatcaggagaaaacaccgcattcatcagccttacctgaaattccagttttcttacagagagtccttacccaatttcagtctgtgtttgctacaccagaaggcttaccaccgataagagaacatgaacatgcaatagttcttagagaagggtgtaatccggtaggggtaataccgtaccgttatccacagttccaaaaagatgagatagagcgcctcatcaaagaaatgttggcttccggaatcatcaatccttccacgagccctttctcgagcccggtgatattagtgaagaagaaagatgggtcgtggcggttttgtgtagactatcgggccctcaataaagaaacggtccccgataagtatcccattcccgtgattgatgaattgttggatgagcttcatggggcaacacttttttcaaaactcgacttaagggccgggtatcaccagatccgggttaaggccgaagacactctcaaaacagcttttcgcactcatgaggggcattacgagtttttagtaatgccatttgggttgacaaacgcgccggcaacgtttcaatcccttatgaacgaggtcttcaaaccattcttgcgcaagtttgtcttggtatttttcgacgatatattggtctacagtagttctgccaggaacatgaggagcatttgaccttggtgttgcacaccctagcagctcataaattgtttgtgaatcagaagaaatgtgattttggcaggtcggaagtagcatatatggggcatatcatctctggtcaaggggtggctgtggatatggagaaggttcaagcgatggtggaatggccccttcctaaaaacctccgggaattacggggatttttgggccttacagggtactaccgcaaattcgtacttcactatgctcatatagccaagcctttaactgatcaactcaagagagatgcgtttgggtggtctgaggcagcaactcaagcctttgaaaagctcaagaaggcgatgatcacatcccctgttttggcaatgccggacttccaagagttgtttgtggttgagaccgacgcatccgggtatggtctgggggcagtgttaatgcaaaacaaccgacccattgccttttacagtaagttgttaggtgcccgggctcaattaaagtcgatctacgaaatggagttgatggccatctgcatggcagttcagaattggagatattatctgctgggtcgacatttcctcattcgtacagaccaacagagtttacgtcatctcactcagcagcgagaagtaagtactgccttccaacgttggatgagtaaacttatggggttcgattttgaaatacagtttaagccggggtgtgccaaccgggtagctgatgcattatcccgcaagacagtgggagaggttgaattgggtgcgctgatattaactcatggggtggactggaccgacttggagcgtgaaattgaaggcgatcctctgttgtgcaaaattaaacaagacttccacgggggtgctattactcctgtgcacttttctttggtggacaacaagctgttgttcaagggtcgatacgtgattcccagctcttcggtttttattcctaccttgctgcgagaatatcacgattctcccattggagggcattcgggggacctcaaaacatatctcaggatggctgccgactggtattggaggggcatgcgcaaggatgtggcgcggtatgtgcaacattgtagcgtgtgtcaacaacaaaaaatgtctcaacagatgccagggggggtactacaaccactccccataccttcctcggtttgggatgacttgtcaatggacttcgtggaaggcttgccatcttccaagggggtaaacaccatcctcgtggtggtcgatcgtttgtctaagtacgcccacttcctcccactacgtcatccatttactgctgtgtcggtggcaaatgtgtttgtcaaagaggtggttcgtttgcatgggtttccttcctccattgtttcagatcgggatcgaatttttatgagtgtgttttggcgggaattatttcgtttacatgacaccacactcaaacgaagtaccgcgtatcatcctcaaacggatggtcagtccgaaatcgtcaatcgagctctggagacttatttgcgttgctttgtgggggaatacccgcgctcttgggctcagtggcttgggccgaattttcatataatacttctcctcatctctctaccaaaatgaccccgtcaaggtcctttatggtagagaccctcctactgtgatacgggttaatcggggagcctcacctgttgaaagcttggaaaacatgctccaagagcgagacgcagtattagatgccttgcagattaatctgattaaagctcaacagaaaatgaagagtagtgctgatgctacaagaagagaggtgcattttaaggtgggagatcgagtgtacttaaaattacagccttaccgtcagaaatctttggcttaacgcccttatgagaagttagccgcccgtttctacggaccatttactattttacagaagattgggcaagctgcatacaagttacaacttcctgtttctagcaaggtgcatccggtgtttcatgtctcccaactgaaacaggccgttggttccattcccgtttcagccactattccagagcaattgtcttctgacttggagttagaggtggaacctgatgaactcctcgatgttcgtagtgtttctagaggccagcacacttacttggaagctctcattcagtggcagggattaccatcattcgaagctacctgggaagatgtggctgctttccatcaccattttccatccttccaccttgaggacaaggtgaaactttgggggggtggtaatgtgatgcaccaaactaccactccactactcacctattagaggcgtaagaaaaagggggtaaatcaggaatagtttacaaattctgttgaaaggaatattttgtaattatgatgtcagaggttgttagcaaaaaggcagtagagtaacaataaaaaggggaagggaggagagaagaaggtattgagatttttgtaaggaacttggcccttgggagagttgggagcctctcgaaagctcaccattatcttgtgaatattttccttcctggttatatacaagaaccttcctctgtcaatttcttttctctctaatcttatttcttattctgttttctggttgccattgtttgaagttgcttgttgtgcttgagtaaatacgtgaagtggtgaaacccatctgaattcatcacatctattccaagtggtataatacaagcttgtaatccaaatctaatgagaaatctaagttatgaagaatttcaaaagaactaagtacccttgttttggatgcccaaggatttacttgccgctcaagttaatgctcaacgtgcaagatacaacctctttagtatcccaaggtagtttccataagaattaattgagctcaaatcaagaacaatatttttatgtattaatgtgaacacttcctgaattatattagatatatggtctgaaggttggaagaaagattagcttttaattttaagtttgagatagtttttagaatcgaggaaagattagctcttaacttgtaaactaaggattgctttataagtaaaacattagttatggaactcttaaaattggttttgaacatttctagttaaaaatcccatgtaattctcccaaactagcttaaaatctcacatttcacaagctaaggagagacaaatggcgttctcttgtgaaacaatctaaaattttcattaggctactgttttcaagtatttatatgttagaagtgccgcatataggtacataaaataagtttacaaacacaagtaggaataaggaaaactaaaagagaaacttcagccatacaaaaccggctgaaatcagctactactttctactttctagcttcaaaatctgattgcaagtctcctttaagccaatcaccaatgaaaacctttcctccacatgaagtgtgctcaaatcaagagaagaaacccatcattcgcctatagctacctgggtcagatgaagatacggcaaaaaaaacgctggaaatcagtgaaccaaaataagcaccaattggatgctttctgtccttgctacattttcttctcataggactacttcaagccatacatgaataagcagttagatccagctcctagcatccatttgatcgtacaaatgagctccaaaaagataagtaaaaccaagcagccaaaacctaattaatactaatgatgaattagttgaatagctaatgacgatgaagcaacactttagtaggaatagtgttaattatgatcaatgctacttaatcttctgattaatttttggaaaaatgtcatatctaccttctgtatacacttattcataactatatcgtattattattatttttaaataactaccttttaagtaccaaaacctaagaaatcaggcacttgatggattccatccaaagatccatttggcggggcccactaactgacttttgattttttgcctttcctcttttggttaatctcaatggttcatcaataacaactcaatcttctccccatttcatcaaatcatccctaaatcagaactttttcaaattcacccaaatgaggttatggaaacctctaccaagtttattcgaccacttttagtctagctcaaagttttacacttgcttcaaaaactaagatttattaactttagaaattaggtttttatttttattttttatttaactttgtaacaatcttaaataactcaggtgctttctagagtttggctttaattgtttttcccttggttatgtgaaagaagtatgactactttctccaagactaaagtagagagcaaaaaatgcaattctggaatttcttgcaaaagaaaaggaacgagttaatgataatgaaaaacaaagaaaatgatgagaagagaggagctgaatcaatcatgatcatgtattttaaagttttttttgctattgaagtgacttaagaagaggaaagaggatgagtgaagacaaacaaaagaaaggataaatagagggaaatcttgggcttagaaaggtgaaaaggtaagaagatgagttagtgggccccaacaaatgtatctttggatataatccgtcatgccactgtttggggcttgcttaagtccatacattacttcactaattttacaaaatttattttcttgaccaagaactgaaaaaaccttcagtggtgatctattaggttttggaagttaaaaggtagttatttaaatgtttttaatataaaaggtagttatttagatatttttaatataaaaggtagttatgtgaataaaagtgtatataaaatgtaattttttgacatttttgccttagtttttcttgctaattcaccttttcaacttgaccaagttgctatgaggagaaaacgagcaattattaagcaaatcgcaacactagcattaatccatggcccatgaaactctccataattagagattggattagcacttagtagaacttcttgctcctgctccaggtttccattacttctttatctaagtgcatcaaaaggttgttgggttatgaaaggtggtggttgtgtatagtcattgtcaaaatgttgttaatgcactctatttagaggatgagggattgaatagttttcacctcgtgacctttcattcctttttaaaaaaattgataatgtgtattggtcctatgactgtatgaatggtaataagctatctcatgagctgttactatcttcctcagagtctaggtagaagggtttgggctgataattttctactatgtgcaattagtttgttggatttggatatgctagttgatataggtcctttcccttgggccttctcttaatataggcctacagtgtgattgaagataaatcttctggagaatataagaacaatgagatggattggttagaggttgatttgttcttttggtgtaagactatttcgggttctctattggttatgttcagacgccagaatatgtgttggtgattgttttccatgaacatactttatccgcagagacatttttcttttttcttcctataagattatatttgtttcctctcttggtgctcatctcagtgtctctactttacgttaaactgttgacattacttgacaatgcgtatatttgtcgcatggtgctcttccctcactccacgtcgaccccatacatcaaaaaatgccattaaagaatattcgaactcacaaccttgtgttgaaagaatggaatccctaccaatgactcattaattcattttctctttaagaaataaatgatttcctcacaaacttttaggctttaagagcccaaaagataaaaacataaaataagatagacatcaacgtcaagattagccttaaatgcacaaagcacatgtcaaatgattgataactactcacgagttgcaactctttgggcgttgcctaatattaattggatctcttttaaaaattgttggtggttatggttggtggagaggaccatgtaacttttagctggtcacaactggtaatgattgtcacttttactgcccataaaaaaatttaaactgttgaatatgtttctggcagtggatctgacaaatcctttacaagttggcgtccattttgttttgccatgtgactcaattataatacgtgagttttattatccaccaggtttggctcactaatttccggattaattcaatctaaactgtctccaaagaaggaaaagggtggaggaggaaagccttcttctaatgaaaagacacgcatacgtggttcgttttctttccagggtggaatgcaggtattagcatgtagctttcattctgttaacatttgtggttcttccagacatacatccaatgctttttttttttcttgctataaccataaacattcttgtcatgaacattctttaatactgttgctgagcttagtgtattcgttcattcatgtaatttcctctcttgaggttaaaatggcatacagccttacaacctatatccataatgctccttagagtagaatccctaggttataacatagtaccacttatcaaaataaacatggcacacactgcaggacaagaagtaaatccacctagagaactgagcacctagtagtaaaagcagcgatacattactaataacagtagcagggccataagagtagtaaatgggcctcatttcaacactccccccgtaatggtgagagagaagaagcagtctgaactcccagcttggagagcaaaatagagtgttgctgaacagggagaaccttagtgaaaacatctggcacttgatcttgagatggaacataggtaggctgaataaccccttcttcatttgtattgtccctcaggaaatgacaatctatgtctacatgcttggttttctcatgatgaactagatatgctgctatggcaagagcagcttggttatcacagtagataggagtagcactggactttttaatgcgaagatctttgaggagttgtttgatccacatcacctcacacacagcaagagccatggatctgtactctgcactgaccacaagaaattgcctctttgactttcaagatacggggggagtcaccaaggagcacacaaaaccagatgtagaatttacaacacccatcccattcactatcacaaaatgctgttagttgagcactagacttgttcgccatgagaattcaccctgttggcagcttgaagatgcacattagtggggcagtgcataaatttgcttaaatcatgtatagtgaaggcaatatcaggcattgccttgtaatagtgagataaatgagcttccccatcaatttttgatacacatcaggttgttgaagaggatcaccattgtcagcatagagcttgacatgtgagtccatacgaagcctcaatcgtctgcaatttataaaaccatattcatcaacaagacccatcacatacttctttagagataaaaacgatacttcactacactgatccacttcaatcctcaaaaaatatcttaggccacccatatctttcatgtgaaattggccagcgaagaaactctttgcttcctcaatagttgctaaactattgccagcaagaatgaggtcgtccacatacaccaatatagcactgaaacagtgagagttttgcttgaagaatagagagtagtcacacttggattaagtgaatacattttgctttaaagcagtgttagcttggcaaaccattgcctcaaagcctacttcaagccataaagtgacttaagcagcttgcacaccttagttcatttggtgtcacttctgccatcagtacttagctccccctctccttgaactttgatcctgttacatgtttcactatatcctggtgatagcttcatgtatacactatcctacaattcaccatgcaaaaaagcatttttaacatccatttgtttgcaagaaccaaccctctaaggatgcaacaacaagcatgtggtcatctttgctacaggggtaaaagtctgctcataatctattccatatctctgtctgtcacccatgattacaagccttggcttatgcctattatttgtgccatcagtgctgtattttgttctgatccatccatgtgagggatggctcatttctacaaaatcctagttccgttaggatttgtgttgttttcctaattctagtaggaataggactcctaaaatcctaatcctcctagttctgttaggagtttaaaagttttagtttgattgtaattctagttgtgttagaaatccaaatcctagattcatgtcacgtatggttagaacatggctagtaggataatttgtcttgtgatgtccatagccttggcatttgtggcacctaactttcaatagcttgtcttctgtctccttttctttctccttctttgaggaatcaacgtttttagagctatctaaaccactagcatcaatattaggtttaaaagtgctaaaagatttcgaatagttcttacttgcatacaatttctttttctagtttatgtagcgtcaccagggaacaaaaactcggccgttccgttctggaacggccgctttgtaacggatttcagagaggccgttccgttaaataccgttctagaacggtgatttggaattcacaccaaactcggcgcgatagcgttacgtaacggtgtaacggcgttccagaaccgttacaatcacataacgtccgttatttgaagaagaccagttcttttggtggaggaagaagaagagccaacgcaagatctatagatctgagttaaaatttgaaaataaaacatgtttttttatttaaattaaagcttacagaggatgtagaactcaaattcgagtaaacccctcctttaatttcattaggttactgcaaatcgaaccctaaattgcaaaccctaatttcgaaaaaaccctaatatgcattgggatgcaacgctgcttctccggtcatggcagagaaggtcgacgagtcatcttcggctgcttttagcactgtagctgccggtggttggcttgtttgcaggttagtgcttgctggttttctttctctcataccgatcatcttcttcttttctctcttctctttttcttttttattgtgtgactgccagtcacgtgataattgcaactcataaagtatctctttctctctcttcttttcatccctttttatttttctttcccttttagtttttattccctcacgtggaatcacctaattttcatccttttttatttttttagttacactcttacacagaagtatgttcaaatatcattatagtacctcaaatattgtatttataagagttttggacataatatgatatagaaagtaaaatagaagaaaaataaagtttaaatgtcacttgtgtgatttttttaaaaaaattcacgccgcgacggccgcgaaacgttctatttcccgttacaagccgttcccgcgataacgcgaccgttcccgcgaacgcgaccgcgaccgcgttttttttccttgagcgtcacatcttgcaagcttcttcaaaggtgagttatgtgtacaactccaatttctctccaatcccctccgtcctcatttaggcctccaaggaagctacttaaacattgatcttcaagttcatcaattttccaaagaatggataacttctcgaactcctttatgtaatcttcaacggacatattcccttgtttaagagtagaccattccatgtacaagctttgtttgtagttagaaggaacaaaacgtcctcttaacaactttttaagcttatcccaagtagagattttgggtttattagctttcacacgctgcctctttactccatccaaccaaatagatgcatatttggttaccttaagcacggccaccttgtatttcttttcttttggtgtctcttaatcccaagtagagcttttgcgtgtgaaagctaataaacacaaaatctctacttgggataatcttcttcttgtttccgaaacaactaattcttatggtagttaggaaagcaagaatggtttctaattcaatagggaatatattaattattattagtttaagttaaatagtgcacgaatctaaatagattattcgtctcaaaatctcacttaagtatagatttgtttggacatctgagggaagaagaagagagcgagataaaggagaattatcactcaatgaatccatatcccgagttttcccatttacttctttgaaagcaatatagttcacgaggtcttattatcagtctatggacataagagtaataatttaagggcaaaaactatgactttatgggtttaaactgatacatgttctgttaaactgatagatgttctgtgttaaaccgatactcatatattcctggttaaactgatagatatatgatttaaattgatacccgtctcagtcatgtcttggattgagacggtctgacacaagactttttgtgtattatatatctgattagaataaatttatcctgtttactaattattttatcttctccagacacttgttgacacaatatgcaatcagtttggtaaagatgaactcaaactacagtgcaaggtcctttcattgtcctacagtcataaggggatcccttcttcagaaaattgggtcgtgtcttctgtgtcaaaaaattccattgaagatcaacaatatgatgctgtcatcgttaccgtgagttttactttgcttactgctattgcaccaatctttcttcttttgacacactgataatggcaatgctgttgtggtttgaagccatgttatggggttttagggatatttatggagtctgatctaatatgttattggataaaattcagatctgtaacgtgactcaatgagattgaaaaaaattgaatcaagataatggattggaaaattaggagctaacctagggtctataagcgatccacttggagtctcataccaagcaggtattcgacattttaggtttatattgctgctatggctcatatgggagcctacatagggtctggtgcttattcctttttcttttgtctagttttggggctgcacatttctgttgtgttttgatatggatagccatcacctgcaattgcatggaggctgaactaagttctataggggagcaaacagtatctgttggaaatttattttcatattgtgtttttaaatgctataatccaaaatttgttgttcccctaaaatgcctaaaatacccttatgtaactgctccatctgtcccttaatagacttcccatttctccaatgcatgtttgccaatacacattttgtattgttaatatcaaaaattacatattagtaaaaattataaaagtttgattttcctaatgtacgcaatgagacgaatcaaacaagacgccatatgactatgttttttcttatacttcctatgttttttaataagtgacatgttttccttttagggaaatgtcacaataagtgacacatagctcaaagtagtaaaaatacttctcatttattacatctttgccattatttaattgtttcacctacctactttatccaatactcaaatttgattggttgaacaattggtcccaactttctctagactccttggtattccctttcccccactttctctctgtgtcacttattaaaaaatggaggacgtatattggaaaaaaattggaaggttttcttcacttatgaatagtggtaaaattagagatgggaaggctattttgggatggatggagtaatatttaaatttttaaaataatgtcattgttttagtgatgaaataaaattcaaggctattttttctagtaattatgttatctgtacatcaccacacgtatcgcgtgcatataagactagtttgatgatattccaacactgttcgaaggaagtcaggcatggaaccatgtttgcttccatatgggaaatattttgcttactctccttcaaacatctacctcattatcccagaatgattgatcgaatctaatacaaatatacaattgatcatatgccaccagggaattacatcaaattaaatttttatagaaggggaatcagtcatagcctcatagggaacgaataagtgatactcgccagtttctttcctggttacttttcctcttctcactagccatcctttatgtatgggtatgctgcatcattcctgccactggttgggactcccgtttgaactatggggggatgggaaagctaagccatcatcttcaaattgagtttcttgagaatgtaagacaccatctgtaagatgaatatagtgcactctatagtcaatgtcatgatctttatgggtttatctgctgaaataactgtgatatacccagctctccatttacaaagttttcctacatattaaactcttgcccgcaattctagaacttcattgtagaacttttcctacataagcatcatttgtcttttctgtagtaaaagttagaaagagctttattttagaacattcgtttttagttttctttgttgttgattactccgccacttttaatacttttatgattcaagtatttgacaaaatcatgtaatttaggtcctctgctgcatgcagtctataccctctctctctctctctctctctctctctctgtggttgtgtcttacttgttgagttactaactccagccattacataaagtaggctggcattatgatgagcaaattactcaagaccacatgttagctcctttttcttttctccttattctgaaaggcaaatataggtccatcttggtgcttctcatgtcataagtaagctgaccccctccttttccagggaataggacaataatccaaaagtgagggttttacatgttgggatttgtgaagtttcttattttacttaatagccgagtcagtgttacaatacatagtaccgtgttacaaaatagtatgtaacaccaagcatgtttatgtgcaaaattgtgcaagactttgttgctggcacgccaagggctgttttaatgtagtttacttattcttttaggtttttcagatgacaatcataaagggaattaggagtgtttttattgtagtcaatccctattgtgctacaacgataaaagaaaaaagcacaagactagaaggagaagtaatgtctaggaaagactcctcacctggggttgctagtcacctacacatcttagaaggcatcaaaccaaagcttattcccctcgactgttttcgggagaaaagaagacaaaattgtttctaacttatactttaccagtttcactacagcatcagaaagaagcaaaatatgctcccacaacacggcgaacctagctttccagatgtgataaaccagaccagcaaaatgattattttcactagagctttgagtctattttttcggtttttccccttcttcctggtaatgtcacgccaccaagccatcatctcaattttttgagatttgacgtaatcgctcaaatagctgagtaagacacttcttgctctaaatactaataaaaaagaggtgaatgtgggtctcagccatgttactcaaatcggataaagtgtctactcttattagggtttttgggtgttggactcatccatttttttttgtaaaatgtcaagattttggtttgaaatgagagattcaagtgtcgtgacatgagtcggcacgcaacacttaaacgtgtcgaagtaacagagggtctcagacaatcaactttaatcaatcacgaaccccaaaatttatgcaacctttgctcatattcagtctctgtaaagcactcaactgcagcacacccacccattcgcttcacctacagcaggagggcacccaagtaattgctatgatgagcgaattattctgttttgccttgctggaatattgctgttagatttgctgactcactggcagttaattatagtcagagaatgagaaatatcctgtagagagagaaagggtatcttttgtatttagctctataaatagctaaggaagggaagggcattgagagtttatgatattataataggagagatttagcctctcgaatgctgataggagcgtagctcttgttggattatcaatactactctgtttgctctatctatttctactcaggttccttcttgtacagtggatccctgattggatttacttcatcaaccagcagataaaattatttgtaggcacattgaaaccattccaaacctaatgaggccaaagtttatcacaaagaatataggagccaaatgtaggcaacagataagagtataattgccagaagttgaagactccaggtattgttcagaaaccttaatgcatatcatcattctgacactagattttccccggagccaactaacaaaaatgaattaaagagattaaggctatgtttagttcacctgaaattttctgatctgaacttatctgatctgatctgaacttattttttctgatctgatctgatctgatctgaaccaatctgattacaagatcttatcttttagatttttctcaatatataagaaaaaatatagtcatgtggggtcttgtttgattcgtctcaatgagtactttattaatattcaattattataatttttactaatatgtaatgaaagatataatgatttttaaatataagcatgatctgaactgatctgatgtgaacttattttttctgatctgatctgatctgattagatctgaaataagcaaaaataaggtgaactgaacatagcctaagcaacaattgagggaaaataagatcattatggctaagataagataaatatgtaatgataaaatcagagtaattatatcagttacactctcaacattcgtcagattgaggtttcctcccaaaatgccaacccacttttctgtattttcacgtccttctctctacccttctaggtatatattacatcagctgtaaaatttttgaaccaactagtagaatactgatctaccctcaactgcctcactttctcattttttctgggcctttttctctctagcacaagtccacataagtgatgcatagcagaaatataattccactagtcatcctcaatattgatataacaaacacatcacccacatattatcatttttaatcgctgcatgcgaggcatacttacccaccaatcaggatatgcataacagcgttcctaattccaaaaccaccatatatcttgggtttgcaactctcatccctagcaacaaggggactttctgaaaaagtggcagattccgcccacaagtagtttgtacggacacctttattatattattaatatcatatttcggcaacacaaattaccagcccagtaaaacatgaattgacatgagactaacaaggggcccaatctaatatcgtacgtctgtactaagcaatgtataaaaaaaagctcaaggtgcattgatgcaatagggatcctaatgtgcataggtgcgcctcattgaagtgaggcaccactaaggataaataaaaaagattgatgtaaaattaaattgtgcaccttgggtgcgcctcgatgaactttttttgtgtgcctaagtgtacctcaagtacgcctcattgatatcgcctcgcctggcagaaaacgagcttgaccccaatcgccttgctccccaccgcctaggcgtgcctcagtcacactttttaaatacattggtattaagtactcagaatggcaaaaagaaactttgggcattaattagacatttcactttttgtgcaactatttgtgacttcagagattgatatgttttctacattacagacttttgtgatggctgcatggtctccactgtcaaagaacattagtttaagtagaagaaatattgctctattaccttcctccctctacaaacaaaatcctaaaatgtggttatgtagtgccaattcaaacttgtagatgcatgactaatgctttcattatgctgtgggtttttatactatgattcatgtccaattacataacaattagctggagtcaggatatgtcacggaaattttaagcctggcaggatgattgtttatattttctctttttcggtgtttaagtcaaagtaaacttctaggctgctcttttataggctagttgggctgttggggagatctacacattaagtgtgaagaaatcttgtctaactccagtttggttgagaactgtaagctgtcataacatttgttgcatgatgaggccttgtgggattatcatgttagctgtaaactctaaacttacttgaaatctagtgttgtgtctccttatttctgtagtcaaaattgaaccttctgtacgtttttgatacctgcgactagaatgatggaattctgaattactgatactattacaaccatctgctaagaacgaagatgactcttagctaatttctcagcagatttagagaaattaagaagaattactaatgaatatttaaagagaaaactaccaagatatgattgtattgatgaaaaacaccaattacaacctaaccaacattcgagaggttggagctctcccaagtaaccatttctctcactaaacttatcaattttcaagatgccttttccattctcagttcctctatatttatactactccccttagcaaactacccaacttattccccaagtaaactaaagagataatatctaaaatacccttccccctacaataatattagttcttagcattaccggccccctaaacttccaccttgtcctcaaggtgggtcgtaatcatcactaaattctgggcctctactcgtatattcagtgtcttgcagcccttcaggccccaagcctaggttatgcagctcgtgttgcggctcctcctcatatagttctctggctggagtgagtgcctcaactataatgaaaaagtcctggaggtggggaaggaaggagtgtctgaaatggtgtggtgtgctgctggtgttatgggcttgtgcctgaaagttttgggtttaaagagatggagtggagaagagtggagaagtgactggagacgtaaaagaaggaatcataatttttgtaagtggtgggttgaaaaagttggtgggaagaattgtttttataaaatgtagtgtaatggtcgaaaaatgggtggagtaagtatggtttttggctggggatgtggtactgggttgaaaataaataggtctgagcttacttgtaaaattggcctcaacatgagcaggcccaatatcttgagccaattccccaaaagctggcaatagagcactcttaattgcattgttgtgggccatcgggctccaaacatatattcggaggagccggacttctttggtgatgtcattagcttggcccattgcacactttcccttaacagcctcaagatcttttcccacttttgtaccccaaccacgtggcttcaccatcctttctttcttgcttttgtcacttttttggcaatatacgagtttgtccttactaccctcatcttctaatgttggcttcctcaccaagcttaatttctggaattttgtccaccaaatcccaccacccatcgtcaacaccatacctatctacaccggccaagaagcctggtcctccacccgaattttcgccacagacaaagcctgaacaaccgtcagttctctcaccggagaagttcacaggtccaccacctgacccactagttgctgatccacccttcacaaatctccctcctctggctgccacaagtagtggttcctccgtaatactcatatttctcgtccaagagccctggaccaccaccggacccacttccaccggcaccaacttgttcaaatgatacttctctttcttttccaaacagcctacttggactggaaaaaccactgcgattgtagcctccgccagatctgtagcctagtgcacctaacgtgcttccaactgcaacccaatagggatggaaatggatgggattcggggagggtggagcatcacccgcatccgtcacccgcatccattcgctccacccgctccacccgcatccatccatccgtcacccacgggtgaaacgggtgggtcggtgataaacgggtggaaccatttagggggtgtttggtatcatgtttttttacaaaagaaacagaatcaagtaacaaaatccgtttctacttgtttggttctatgttgctcagactcgagtacccatgtccgacacgggtacgtgtccaagtgtccaactcagctattttctagaattttttatattttttaacccaaaacaaagtgtccaagtgtcccacccatgtccgactcccgaggatccgacacgggtacttgaggtgaaatgaagagtccgagcaacggaggtttggttagtgtgtaaagtaacaattaccgttacttgaggaaaacacatccccccaagttgtttccattcaaaaacctaaggaaacaaataacgtttcactcctcaaacaagaggaaagggaatgggttatatttatttccattccattaggataccaaacaactaataagggtaacacttattattatcctttcccctccttatcaaaatcctttccattccgtttacggtattcataccaaacacccccttagtatattttctaatgaaatttgtgatatgatatgcatgatataaaataattctatcaaaaatataaaaagtaagtaaacttacatgtacaacttaatagatgggtgatgggttggaggttaaacgagtgatggatcgggtgacgggtgaagaaattctcacccaccactcgctttccatccatttaaattaggtttttcatccatttaaaaaaccgggttaaacaggtgatgtatgatccatcacccatttccatcctcaaacacatcccgatttgtttactgcaccaccagatccaccagtataaccacccgaaaaatcatcatgccttctactagccttgtaacctgctcccggtgagaagcttcttccacaagtggtggtcgctggacctccatctccttcttccccaaaaaattttccatgacacccactcgacccttcatctgtgacaacctcttcttcgtccacctctgaagttttggggtcgtcttcctcctcaagctcctcttgaagtaactttaacttccgttggatgggagagaacgcttcattgattatcttcaccagatcttcttgaagtttctcgaaactttttctcacgttttcctctacctctttcgtgatttcctttccgatctccttcatttttagactaggagctcttgcgattccatggcagatttctttttttaaaacaagaaaatcaggcacttaatctcccagaatagtggtgctctgataccattttctaagaaccaagatgactcttagctaatttctcagcataacaacaaatttagagaaattaagaagaattactaatgaatatttaaagagaaaactactaagatatgattgtattgatgaaaaacaccgattacaacctaaccaagaggttggagctctcccaagtaaccatttctctcactaaacttatcaattttcaagatgccgtttactactccccttagcaaactacccaacttattccccaataaactaaagagataatatctaaaatacccttccccctacaatattagttcttagcaccatcaaactgggatggatggttttgtaaggttccaatttacttctccatcaaaatattttaggattttttatctcatgtattttagagtttcctcgtccctttttatctgataagattcttctgatgatttgattttatggtaggctccaatcagcaatattaaagaactgaagattctgaaagctggagttccattttcacttgacttcattccagaggtttgtatttttatagtggttagacatgcttcccctagttttcaaagtaaaagcatccttgttgtgacgatattttttcccttgtttttgtttttattattatcatcacttatttccattttctattttccatgctgataagatgttcatcaccataatcttgtggtatcagaagtgtttagtggagtttattcactacacatgcagttgttcttttgccatgaccgccattcattttctcgtcaaaacaaatctatgaagtttggttttcagactcatggttcttgtagctcttgtgaatttttttttcttctccttgcatgcattcttcaaattacatattgcatataccaggtgctctcctttattttatatttaatttttaaaattctatcatatattttttaatgtcaaacctcaaactaggggttcactgcatcttaggcttaccaggctaatatttctttacttaaccttttccctttatatttgctatcctcttgtgtagtaatcaccataagaagggtacaaactaaattaccctcccattcttttgtatcattctgaaatagtgtcacagagctttgatttttttgccctcatttaatctggcaaatgttctctctatttttttttttttactttcttttgacgggattctcaggcaattgttacggggagcagccagtcacactgtttctgtttattatgcaggtgagttacctgcccctctctgttatgattactgcgtttaagaagaccagcgttacaagacctcttgagggcttcggagttcttatcccttcgaatgagcaacataatggactgaagactgarggtaattgtctggttcacgtgtgtagcgaatcagattttcaaaccctgatttcgtaacattgcaggtactctgttttcatctatgatgtttccagatcgtgctttctccgatatgtatctctatactacctttgttggaggaagcagaaatagagaacttgcaaaagcttcaacgtatgagatatgcaatgttttaaatgtatgctatagtcatcgtttcaaccttttggtgcctttttcttactaatttatcctcctggtttaatgatcttagggatgaattggagcaaatagtttcgtctgatctccaccagctgttgggcactgagggaaaacctacttttgtgaagtattgatatctttcacccaacttaacatgatttgtgcttataatatgttaaataaagtaactgaaatcctgaaattaagactacgaaactgtatggtgacagtcatttttactggaacaatgcattccctttatatgggcacaattacgactcagttctgagagcaatagaaaagatggaaagagatcttcctggacttttttacgcaggtaatctgtcatttgcttgttgcgataaagttcatgtacagttggcatatcaatcaacttgcattctttcttgctaactccaaacaatcaggatcattaacttgtaggctgcagcaacagagagtatctcccaagttgttaggtttcatgtaacctcgtcgctgagatgaaatttccgttggctaaaaagtgaaagttttgtattgatgttacccaaaacaaaagtattttgcatgttgcttgaagttttggttgtttcagatagtacatcctttgacatgaaaataaatggaaaagcgtatgtcaagcaattatcatctagtttctttgtttctagatactagccgcatttgatcccagatcatttttgaggaagtcagctgaaataccgtagctatccttcagttttcataataaaactttaatggatctgatgtacagtaatttagtgtgcaccgggttaataattgatattaacttcatatagtgagtcttataaagatataatgaacttatatacaatatagtggattttattaatggaaaacatatagtgaaactatatgcaatatagtatgatacataaagacttagacaacaagagcattcgaaattacaaagaacaaaggaaagaacaattgtatcaaaccggttcgaatgaacaaacaaccaccacttccacaatcaatgtaccaccaatcaagactaaactataacaatgagcttctagtttaagtctactttgagttttaatcaccaattcaacgattagatgatcaaaattgcaaaggttaagagttggtcaaacctaaccaagagttacactaggcacatagctttgttaggagtatattagtttatgaattctagttaagttagaaatccaatacctagttggattaggattcctaattggattagaattatagtttagttagaattctagtaatagtaggcgtgtgattaggagatataattagcttaattcttatattgttagtttaattcttatcctcgttttaggtttatctttagtcgaacttgtaccctatataaggggcctttatttcattaataatatagtttattttgagtttaaacctttacttgtgattgtttgcttgagaggttattaatcgaaccattaataacttttcaggattgttaagtttttagtgttaaacatcttaatttcaggagtgattttaagagtgtttagattcttgtattcaagtttcaggactgatcttgaatcaagaaatatccctagtttcgactaatatcataagtagttcgaattcttggagtcttttcttcaagattcatattcataacttgattatttagacttcttggttttgtaatcatatcaagtggtatcagttttccagggaggagaggatacaaagggttctctttgatcaaagaagatccaagggcatcaataagaatgacacttgcaataagttcgagtgatacaaacaacttcaagactcgatcttttgctaccaagaaccaatcttgacgcctgaagattgttaggacaaaggataagaagtgtttctacatccaagattgcattctttacgtccaagattgcgtcaagatccattctttaagttcaagaaaggagtagaaagcattcgaacactacttaaacatgacatccgagatggataagctggctatggccatgagtgccttggcacaatcacaaactgagtcacgcaaccacatgggtaggatggaggcacgtgaccgtggattgaaactagatgactatagtggagatggcaatccagaagacttgttggagtggatttgccaactaggcaaagtgagtgattataggggctttgatcacaagaagagattcaaggttgcttccattaggctcacgaagtatgctggaatacggctcgaaggattgcatgcacaaacttcttgcctaatgactatgaacaaaaacagttcataaggctcgcatcaataagccaaaacacacttagtgtacacgaatacagcatggagtttgacaaattagggcttatatgtgacatagaagagaaagagcaatacaagattgcaatgtacattaaagggttgaatcgatatatagccaagaagatcgaagtctcaacttatcacttctttgaggatgtgactaaattggctaagaaattcgaagagcatgacaaagaagaagggcctaagagttcttacacacctaagtatgactctagtgctaaagggaaatcaacagttccctactcaaggtggtcggaaagacctaagaaccccactacacctaaggaggacactagcatggagaagacaaaagtggccgtacctaaggagagtttaattttgtgttttatacatctttgcttaagagcttaacaattgaaactattaataacttttcaggatggttaagtttttagtgttaaacatcttaatttcaggagtgattttaagagtatttagattcttgtattcaagtttcaggagtgatcttgaatcaagaaatatccccttgttcaactattataattgatcttattcgagttcttggagttaatttcttcaagattcatattcatacttgattattagacttcttggtttagtaatcatatcaatatcattagcattaatttacccccagggagattaagaaaggattagcctaatcaaggcgcttaagaagtttttaggaaaaatcgtgcttgttaagcttaagaattgaacttctttcaccatttgcccttgattctcttgttgaactagaagatcttggttcatagtagatgctcctgcatcatagtagagcatttaattttaattttttaacatgcacgaagatgtaggtagtgtagtatatatcgtgagacgtggtttaacatatagaaagatgtagtttctgcatgatatagtgagtttttgcatgatatagtgaatgtctgaatgatacagtggatcgttccgaattgttgtagtttgtatgatatagtatttttgtgaatgatatagtgagtttcttcatgatacaatgggtttctgaatgatatagtggattgcttagaaatgatatagtgagcttttgtatcatgtagtaggtttctatgtgatataggttgttaaaagatgatacatgcttttggcctcatgtactctaatgttaacgtgaacccggtccttgcaagtcaattgcagttttttcaatattaagctatttttttttttttttttttttttttttttttttttttgtacgggaatatttagcatctttaccacaaacataaccatacgaatattatgcggaaattccagtctgaagtcttaacttttcaaaattaaaagcttctatattatttttggaatgaaaaaaaatgagctatggcatgttattttgaaatacaatgagtctcaaggtgcatagtggcttcaattctacgaataatgaatggactactgatttctaattttttgttccgggcttttgcattaggtaaccataaagatggactctctgtgggaagaactatttcctctggatacaaagctgcggagcttgtgatatcctatctcaactctacttaagatgcctaaatgatcgaggagactccgtaagtcctttctctgattctatctttgaactgagtggaaacacgactgtggtctaaagtagttgatgtctcagatatccagaaatggcgttagtgatattcaggagctgtccattgaccctttgattcattgttgcagtttactgaaagttgttagctggtctcagaaaaacgaaaggaaaaaagggggaaaacaaaaacaaagaaacgtagattgtggtgttaaaatcaagaattccagagatttgtaccttctttatcagttgaattgtttacagtgtgaatcaagaagttagctcgaccttcttttcttgtgaatggtaagatttcgtgatcatcaatacttgattgtgctgtttgcaacttcaacggtaagatttcctgatcttacagtttaattgcttgtgctgtttgccactt

SEQ ID NO: 36 - DNA, 1575 bp, synthetic construct
  misc_feature 1..1575: note = L397E mutated Beta vulgaris PPO2
  source 1..1575: mol_type = other DNA
atggtaatgctatacgattctcacctctcaggagtctcaactcatcttcaactatcgcaggcatttcccaggaagaacccattaatggccaaagtgtctgagccgggtaaacccacttctgctaaaaggattgctgttgttggtgctggtgttagtggacttgctgccgcatataagctaaagtcccatggcttgagtgtgacattgtttgaagctgatactagagctggaggaaaactcaaaactgttgcaaaggatggtttgatttgggatgagggggcaaatactatgatagagagtgaagcggaggtcacgagtttactcgatgatcttgggcttcgtgagaagcagcagtttccaattgcacaaaacaaaagatacattgcgagagacggtcgtcctgtgctgataccttcgagtcccattgcacttctcaagagcaatatcctttcagcgcaatctaagctacaacttatgttggagccattcctttggagaaaacgctatgcttctaagatttctgatgagcatgctcaggaaagtgtgggtgagttttttgagcgacattttgggaaagagtttgttgattatctaattgatccttttgtcgcgggtacaagtggaggagatcctcagtctctttctatgcgtcatgcatttccagaagtatggaatattgagaacaagtttggctcactaatttccggattaattcaatctaaactgtctccaaagaaggaaaagggtggaggaggaaagccttcttctaatgaaaagacacgcatacgtggttcgttttctttccagggtggaatgcagacacttgttgacacaatatgcaatcagtttggtaaagatgaactcaaactacagtgcaaggtcctttcattgtcctacagtcataaggggatcccttcttcagaaaattgggtcgtgtcttctgtgtcaaaaaattccattgaagatcaacaatatgatgctgtcatcgttaccgctccaatcagcaatattaaagaactgaagattctgaaagctggagttccattttcacttgacttcattccagaggtgagttacctgcccctctctgttatgattactgcgtttaagaagaccagcgttacaagacctcttgagggcttcggagttcttatcccttcgaatgagcaacataatggactgaagactgarggtactctgttttcatctatgatgtttccagatcgtgctttctccgatatgtatctctatactacctttgttggaggaagcagaaatagagaacttgcaaaagcttcaacggatgaattggagcaaatagtttcgtctgatctccaccagctgttgggcactgagggaaaacctacttttgtgaatcatttttactggaacaatgcattccctttatatgggcacaattacgactcagttctgagagcaatagaaaagatggaaagagatcttcctggacttttttacgcaggtaaccataaagatggactctctgtgggaagaactatttcctctggatacaaagctgcggagcttgtgatatcctatctcaactctacttaa

SEQ ID NO: 37 - protein, 524 aa, synthetic construct
  REGION 1..524: note = L397E mutant protein of Beta vulgaris PPO2
MVMLYDSHLSGVSTHLQLSQAFPRKNPLMAKVSEPGKPTSAKRIAVVGAGVSGLAAAYKLKSHGLSVTLFEADTRAGGKLKTVAKDGLIWDEGANTMIESEAEVTSLLDDLGLREKQQFPIAQNKRYIARDGRPVLIPSSPIALLKSNILSAQSKLQLMLEPFLWRKRYASKISDEHAQESVGEFFERHFGKEFVDYLIDPFVAGTSGGDPQSLSMRHAFPEVWNIENKFGSLISGLIQSKLSPKKEKGGGGKPSSNEKTRIRGSFSFQGGMQTLVDTICNQFGKDELKLQCKVLSLSYSHKGIPSSENWVVSSVSKNSIEDQQYDAVIVTAPISNIKELKILKAGVPFSLDFIPEVSYLPLSVMITAFKKTSVTRPLEGFGVLIPSNEQHNGLKTEGTLFSSMMFPDRAFSDMYLYTTFVGGSRNRELAKASTDELEQIVSSDLHQLLGTEGKPTFVNHFYWNNAFPLYGHNYDSVLRAIEKMERDLPGLFYAGNHKDGLSVGRTISSGYKAAELVISYLNST

SEQ ID NO: 38 - DNA, 37009 bp, synthetic construct
  misc_feature 1..37009: note = G398A mutated Beta vulgaris PPO2
  variation 32465: note = n is any nucleotide
  source 1..37009: mol_type = other DNA
tattccatcgaatgtagcaaattgactgtccgttgcaatttcggagtttccactcgtcgcatggtaaatggtaatgctatacgattctcacctctcaggagtctcaactcatcttcaactatcgcaggcatttcccaggaagaacccattaatggccaaagtgtctgagccgggtaaacccagtaagtcaaacattcgaatcacaactcaagcaaatttgtcttgtttgcgttatattttgctcatttcagccttttttgtttttccgacctttgcatactgaatattgtgtgtgtgtgtgtgtggggtttcagcttctgctaaaaggattgctgttgttggtgctggtgttaggtaaattttcgtctcttgcagagtttttgagtcatttgggaattctatgtgaaacttgtaactcccttcagtccaacgaacgcagtacaattttctatcaaatcatggtcctaatttccaattttccatatatattgttggaattatattgggattgtctatcactattaatagtattaggatcaattgtagagaagcacagaaatttttgggatcgaaagaatatctggattgccacattaacagcagatataattcttccaattggtttttggttcttcctaccttgacttgtctggtcaaacattataaactttaacctttaatatccattaaagtaaactataggatttttttgtctaaaacatgcttatataacatgaaatttgtgagaaaccaccttatatatatttttttgcgaaaacaaaccttaaacaaaattattatcgtgagaacaaaccttatgccaatttcgatcattgacccaaggttttggcattgaccgtgtcatgaattttgttgggtttaaaaagtcatgtgtcttgcatacgaaatggtaaatgcgggaaccttgggtcaatgtttggaatccgcataaggtttgttctcccaaaaaatgtttttgttcaaggtttgtttttgcaaaaaaacttatataaggtgctttctcagaaatttcatgttttataaagtagtatttgacaaaaaaccctaaaatatattatagaattattattgactaaattgtgtaaaaatgtactcttctaaaagtacattatagtattttagtggaacatttgcgagaaactactttataaatacgatttttgcgagaaatttcctaataaaaaaatgtgaagtgcaaaactatcttattgataattttctactccctcaaatccaaaatactatgaagtctttcctttctggtttgtcccagattagtttgtacgcttccatctttggtatgatcccacttttattatacttattagttttacgtgagttccttactctatctcttttaacaaaaatactcaactatctctatccaataaaaagttccttactagtcctatcacatctgctttttaataaaataacgtttgataaccacacaacttatatccttaaaatacacgttcaaccaagtgttgagattaatttggacggagggaataaatattttttgaggcatattggtagcagtattcggattccgataggttgactatgtttccaatgttgaccaacacttgccttgcatgtaattctaactttgctcttttttattcttcatttccctcgtattccatatacaatgtttagagacccattccttcctcttctcttctttcccttccttactatgctttgccataatcttcctcaaatgagtgcaaattaatttgtcgttgatgtaggccaactgattgtagcacatcttcatagttcatacctcaacacactcgtaattatattataccctacatgttaaatggctcatgaagctttattttatatcatacttcctccgtttcacaataagtgtaacacttttcttatttggaataatcacaataagtgaaaccaagctccaaatggtaagaaaagttcactcttattacaaatataccaccaaaaagtaagaggggatcacaacttcaatacttcttcactctactttattgtggtcccaactttctctctctaaattccttggtaactccccactttctctatgtttcacttatggtgaaatggaggaagtattttgtagtggtatttagctactaggccttggatgatatacaatcatacaatgtatttatattcacgataatttgctgcccaccttgattaccatgatttccaccaattttatcaatttcagtacttcaccaccccgaatttatattttttatttccaaccttggtatctccatttgtctgagtgcccgatccatttgtatcgcctccagaattgaagaagcttcctgcagctagacaattaggaaggttaaaaaagtttggagatggtggaggatagccataataatcattgttgggaggtggaacttggaaggttattgtagggttgaagtccttgatgaagaagaattgagttcaaatgagaggaaaaaggagcagggaagagggacaataagaaaaaaaagggtaaactaaaatcacgtgtaaggcatgtgcagatcaacatcagaaagcatagtcaacctactggtattagggcactgatacctttttgggtcaaaatttttttacaaggtatttcatgaggtagttttgtccatttttttttttacaaggtatcgtctcattttttttttatcatttagtttctcgcaataagtgtatttcatgaggtagttttttccaaaatttcctcatttattataaaatacctcatcttttccataaataatgcaatgtctagacttttacgctgtttacacatgctcctttgaccatctattgacacacaaggaaaaatagagtagagtcatgcaggatcttgttagatttttctcgatatatactttcaaaagatcaatttttttataattttttttttgaggggattttttttttataattatgtacttatcaaaggtcaaagttgtgcaccgggaagcataaaactctatgtgttgcaatttacatggaaggggaggagtataataagagaaaattatggtaaaaggttcattcctggagatcatgagaaaggaagtagaaagaacaaaaaagaacaatgggagtgcttttcaatgtttgttgtacgtagcatttattcatttgctataatgttttgtgacattgtagtggacttgctgccgcatataagctaaagtcccatggcttgagtgtgacattgtttgaagctgatactagagctggaggaaaactcaaaactgttgcaaaggatggtttgatttgggatgagggggcaaatactatggtaatgtttttgattattgcaggtcttgcactttagcgcacaattaatttctggatttttttttgtactgtggtggttatggtcatcaacatgtctcacccactgtgcttgcagatagagagtgaagcggaggtcacgagtttactcgatgatcttgggcttcgtgagaagcagcagtttgtaagtctttcattatctgaatggcacatactttatttcgaaagattgtaattgccttttctttctagatggcttcatcttcatgttgctttctgattcagtttcgtggctaactttccaagtttgtctgattgctaactctgtcatagccaattgcacaaaacaaaagatacattgcgagagacggtcgtcctgtgctggtaagtttgcttgttttacttttgacctcttttaagatctttcaactctggagcctggaaacatggtgatgcaggaggcaagttctctctattttacatcctttcttctctgtatcttatgacatttgcctcttattctgtgcagataccttcgagtcccattgcacttctcaagagcaatatcctttcagcgcaatctaaggtcgttttatgttaagacatacttgatgctgagagtttattgaattcttaaccttcttcttattttttttttatttttttagcaaaaggtaagtatattgcatttaccaaaaaacagtatgtacaccaccacagcagccatgtcagaatctagaaataccaccgaaaaaatcctacacccaaccagagacagttatattatatcctactcctaagtttctgtacccaatttacatcaatattggtccatttacaagatatttttataattcacagaagcacatcagttttaattagtttaataatgacctctggatgaataaccaactcagaccatatagccttattcctggctttccggaagttgtacgccagagcagcaagcacagcaatgcaaacctgtttcttatacctccttttatgtgtcttagcccatctcttatagctagtgaagatacagtcgtgtgcacaggattgaaccccaatccaactagcgaaagcctcacaacattatgactataaatacatctgaagtataaatgctgcacctttttctcctcttgcctgcacggtatcagaacaaatcccagctttagctaacaattccctggttttcagtttattcaatgccatcatgcaagcaatgaaagaatgttttggaacattcagtttgttccaaacacagtgagagcaagggacctttcctgcagttccacttagccacttatatccctgactaatagtatgactctttgcaccgtaaattgatttcaacttaactttttcataagcagtgaattgtgtgttgttagagtgtctagctgtctaggagattgggagaaaaggagggaccaaggagatagaaacacacctttgtgtttctttgtgtatttactttttagggtgggtcacgttttctgagaaatttgggaaaaggaagaaatagtaacacactttcccatttgtataacctgtatactggagctccaatataatttgcatttttttttgagctgcaagaatatgttgacaaacagttattgcttcttcctcagctacaacttatgttggagccattcctttggagaaaacgctatgcttctaagatttctgatgagcatgctcaggaaaggtaatgtcaagacatgtgttacctcgccttaattttcgttccaggaggtgagcatgcatttagaactaaaaggcacaaagactgttggtggtcttgcctgttcaaatataatggagaggagttttcgctacatttaccctctcttgaagtggggttgaaatatagcatcaagttgaatgcttgattaagtttaaaggacttgtgtaactctttttctgtttactgtgattacatgacctggttgattaacataatggtctgtttatctgtagtgtgggtgagttttttgagcgacattttgggaaagaggtaatggtttaccatagtatttctgctttagtggtaaattgtaatgttgctgataattatacttcgctgcagtttgttgattatctaattgatccttttgtcgcgggtacaagtggaggagatcctcagtctctttctgtaagtgaacattttgtgcttcactcccaattttttggaggctggaaatagattcttttccagttgttctgtcaaaaatagatgtagctttattttgaatttgaagttcccaattgttcattttgactattactgattattgctaagagtggcattatgctattatgctcctaaaagaaaggtgaattttgacctacatatagtataatgtatcaatattggtttaattgtttgttcttttgttccttttggtgctcatcttgcgccttgttctcatcgctcgttttttcatgttgcacttgatttaaatttgctcagcttaacttgtctttttgaatttatattacttattgctatattttactaatttcgttgaaactaattttttgctgaacttttcgttttgttgaaatcatttttctgaattaacttgattttcctgaatagaattgaattttggtgatcttaccttttctgcagccttttatttctttcttgtcctttttccaatctcatttttttatatttccattgtgttgacatcttatcattaactgtgcagatgcgtcatgcatttccagaagtatggaatattgagaacaagtatggaccataagacgtttattttaatcgacatgtatgtttcttagtttatacatatattaattctgtggtaaaaaaaccgaacaagaatatctttttttttttctatcatcaaaaagggtgaatatatgtagaggaaaaagatttgaatcaagatattagcctaaagcaataataatgttagtaatagctttaataacaaattcaaaacgtacattaatgaaccgagaggccggaaaatagttaaagtgaccactaagagaagcgaaggattcatgatgggttttcaacccagtagggcaaatttgttcaatgttctttacaaatcaagcttattaccttgtgggtgtttttgctagagatgaatgatagaattttccctagttggaagtcttttttggttactttatgggagctagtgatgtaatttgtttcgccttatggcatttcctaacatgtgcttttgtgatgtattgaagctttttttttgccttaatttatgctggattttaattttgttctttgtttcatttttcttgcttttgaaaaaaatatatagatatgtatatattaggattggtcgaggattttgagggaagggaaagacctaagaaaacttggatgagggtgattgatagtgatatgagtctatttgggatcgaagaaaatattcctttggataaggtgtagtggagggttgagggagcaaatttatgcagattagcttgacttaaagtttttctttttgattatttttcatttacttgtgttttgcaaacatttactcatgaatgatgtaaacttcttcaaccaaatctctggaaaaaaataatctacatggaaaaaacattattaatgttaacttgacagagatcccatccttgtgaagcagctagcaattaggcatctaacaattgacattttaatggacaggatagaatgtctcttgatagtcaataccctctgtttcattgtatcccatagctactaatctagtttgtatctttccaaagaaccattattttgaagtttcaccttgaacacccattttgaaccaatatgtttcttgcccttggggagaggggctaattgccatgttttgatgcggatgcaaagacacttgttctacctgagcctattgacttgatcatggatactctagggtttgaactcaagggaaagaatcaagtcttggcatgtgtggtgacatggcgtggggatggagtaaagaagagtcatagttctgttaggatatgttcttgcttgctacatagaatcgtagttctgttaggattgctatgatattatatctagtagatagattttatagttaattaggataaacatgtgatgatcatgttataataggcatgtgattagaggataggattagcttaattcttatcttgttgttagtttaattcttatcctagttttatgtttatcttagtcgaagttgtagccatataaagggcgttccattcattaataatacttagttttgctttgtgttttaaacatacttcttgattattgtttgcttgtgagctaactaatcaaaccattaaagacttttcaggagttttagtgctaaacatcttaatttcaggagtgattttaagagcgtttagtgatcttgaatcaagaaatatccttgttcttgttcgactaatatcagtggttttgttcgagttcttggagttaatctcttcaagattcttattcaacttgattgttgagcttattggtttagtaatcatatcaagtggtatcagttttccagggaggagaggatagataggattctctttgatcaacaaagatccaagggctatcaacaaggttcaaacattgctgcttgttcaagacttgatctttttctaccaagatgcattctttacgtcacaaggtagtaataacaagattaagagtggtttttacatccaagaatcaatctttcacgtccaagatttcatctttcacgtctaagattcattctttaagatcaagaaagttataacaagcatagaagaacacataaccatggagtccgagatggacaagcttgccaaagctatgcaagcacttgcaaagtcgcaaactgaatcacagagtcgactcaatgagaatactaccacaatcaatgggattggtagtaacatgaataggttggaggcacgcatggatgccattgcaaccatcatacaaaagaagcttgatcggaatagtgccaacttcataggtgccaattcagaggaagagttggcagaacgtgaagaaagatcatccaagactacatacaatgatgatcgtggcttaaagttggatgactataatggagatagcaatcgagaagacttgttacagtggattcgacaacttgagaaggtatgtgattatagaggctttgatgacaagaaaagattcaggattgcctccataagactcacgaaatatgctggaatttggcttgaaagcttcaaggcacaacgagccaagaaaggtaaagaaaagttgtgtagttggacaaagttgaaagttcaagcttaaagagaagttcttgcctagtgactatgaacaaaaatagttcataagactctctactataagccaagacacgcttagtgtacatgagtacaccatggaatttgacaagctagggcttatatttgacatagaggagaaagaacaatggaagattgcaagatacatcaaaggcttgaaccgccacattgccaagaaggtggaagtatccacttatcacacctttgaggatgtgacaaagttggctaagaagtttgaagaacatgagaaggaagagaagcctaagagttcttacacgcctaagtatgatactaatgctaaggccaaggctagcttcctactcaaagtggtatgaaggacctaagaggctaagaacctcaccccacctaaagaagacacaagagttgagaagcctaaagtcgtcgttccaaaggagaaatttgaagagatgagaaagtgcttcaagtgtcaaggaaggagacacatagcaagcaattgtcctaacaaaagagtcctcaccatgagacaatacctagctttgcaagaagaggaggatgtctattagttcgtccctgatgaagagcaaacttaggggaagaagaggaggaggatgcttttgctgaggatgatgcaaggctagtaggggtcaagaggcgcaccttacatgtcgaccatacacctagcatggagcaaatggaaaaatcttttccacactagatgcaaggtaggtgactatatatgtaatggtataatagatagtggttcttgcactaatgttattgtatctgaggtagtgtcaaagctaaacttagctacaagggcacaccctaagccatacaagttgagtttgctagatgatagcactggcatgagagtaaagaaacaagctttgatttcattctctataggggttataaggatgagttatggggtgatgtattgcctatgagtgcatgtcatctcttgcttggaagaccattgcagtttgataaaaaggtcatccatgagggggactctaatgtgtactctgtgttggttggttctaagagggtatgtttgcatcccttagctcctcattcagtggcgccaaagcaaccacctaagacaccaagttactttctatcttcaagggagttcgaacaagaggtggaggaagaaggttgtgcttatgccttgattgtaagacatgctgccacaagtgtcaagactactagcaatgagaagctcgaagccttgatgaaagagtttgaggatgtctttctagaggaactacgacccttgagaggcatagaacatgctgtagaccttgtacctggcgcccctttgcctaacaagcctgcttataagtgtgatccagtggcatctagggaattgcaacgccaaattgaggacctaattgaaaagggctatttaagggagatcatgagtccatgtgttgtgccagctttactagttcctaagaaagatgacacatggaggatgtgcatagatagtagagcagtgaacaacattacagtcaagtaaaggtttcctatgcctagattggaagatatgttggataagttacatggggcatcaatcttttctaagattgatcttcgaagtggctaccaccaaatgaggatcagagaaggtgatgagtggaaaacaacattcaagaccaagcagggattgtatgagtggatggtgatgccatttgccttatgcaatgcgccaagctctttcatgagcttgatgaatgaggtacttcgtccgttccttaacaagtttgtggttgtttacatagatgatatacatatctatagccaaaatgtggaggaacacttgttgaacttgcgtagcttattcatgaagcttagagagcaccaactctatggtaagattgatggcgacgaggttgacgggggattatggcggcagtgaatcaccctctttgccggtcactgaaatacaacctgaggtatctttaaattctgtaattggattgactaacccaaaaactatgaaattgctgggaaaaattgctggatgtgaagttgtggtgatgattgaccctggggcaacccataattttttatcactagctactgttgagaaattagctattcctgtgtcggaatcggaaggatttggggtttctctaggggatggacaggcggtgaggggtagtggaatttgtagaggggtgttattgagtttaaatggtggagttgaagtggaaacagattttcagcctctgggtcttggtaattcggacgtgattttgggtgtacagtggctggagacgttggggacagtggagagcaattggaaaacacaaacaatggggtttgaaatcgagggtgtcaagttcactttgaaggtgacccatcactggcgaggtctcgaatctcactcaaagccatgatacgtaccttatgtaaagagggtggaggtttgtggcttgagttgaaccagattgagcattatcaggagaaaacaccgcattcatcagccttacctgaaattccagttttcttacagagagtccttacccaatttcagtctgtgtttgctacaccagaaggcttaccaccgataagagaacatgaacatgcaatagttcttagagaagggtgtaatccggtaggggtaataccgtaccgttatccacagttccaaaaagatgagatagagcgcctcatcaaagaaatgttggcttccggaatcatcaatccttccacgagccctttctcgagcccggtgatattagtgaagaagaaagatgggtcgtggcggttttgtgtagactatcgggccctcaataaagaaacggtccccgataagtatcccattcccgtgattgatgaattgttggatgagcttcatggggcaacacttttttcaaaactcgacttaagggccgggtatcaccagatccgggttaaggccgaagacactctcaaaacagcttttcgcactcatgaggggcattacgagtttttagtaatgccatttgggttgacaaacgcgccggcaacgtttcaatcccttatgaacgaggtcttcaaaccattcttgcgcaagtttgtcttggtatttttcgacgatatattggtctacagtagttctgccaggaacatgaggagcatttgaccttggtgttgcacaccctagcagctcataaattgtttgtgaatcagaagaaatgtgattttggcaggtcggaagtagcatatatggggcatatcatctctggtcaaggggtggctgtggatatggagaaggttcaagcgatggtggaatggccccttcctaaaaacctccgggaattacggggatttttgggccttacagggtactaccgcaaattcgtacttcactatgctcatatagccaagcctttaactgatcaactcaagagagatgcgtttgggtggtctgaggcagcaactcaagcctttgaaaagctcaagaaggcgatgatcacatcccctgttttggcaatgccggacttccaagagttgtttgtggttgagaccgacgcatccgggtatggtctgggggcagtgttaatgcaaaacaaccgacccattgccttttacagtaagttgttaggtgcccgggctcaattaaagtcgatctacgaaatggagttgatggccatctgcatggcagttcagaattggagatattatctgctgggtcgacatttcctcattcgtacagaccaacagagtttacgtcatctcactcagcagcgagaagtaagtactgccttccaacgttggatgagtaaacttatggggttcgattttgaaatacagtttaagccggggtgtgccaaccgggtagctgatgcattatcccgcaagacagtgggagaggttgaattgggtgcgctgatattaactcatggggtggactggaccgacttggagcgtgaaattgaaggcgatcctctgttgtgcaaaattaaacaagacttccacgggggtgctattactcctgtgcacttttctttggtggacaacaagctgttgttcaagggtcgatacgtgattcccagctcttcggtttttattcctaccttgctgcgagaatatcacgattctcccattggagggcattcgggggacctcaaaacatatctcaggatggctgccgactggtattggaggggcatgcgcaaggatgtggcgcggtatgtgcaacattgtagcgtgtgtcaacaacaaaaaatgtctcaacagatgccagggggggtactacaaccactccccataccttcctcggtttgggatgacttgtcaatggacttcgtggaaggcttgccatcttccaagggggtaaacaccatcctcgtggtggtcgatcgtttgtctaagtacgcccacttcctcccactacgtcatccatttactgctgtgtcggtggcaaatgtgtttgtcaaagaggtggttcgtttgcatgggtttccttcctccattgtttcagatcgggatcgaatttttatgagtgtgttttggcgggaattatttcgtttacatgacaccacactcaaacgaagtaccgcgtatcatcctcaaacggatggtcagtccgaaatcgtcaatcgagctctggagacttatttgcgttgctttgtgggggaatacccgcgctcttgggctcagtggcttgggccgaattttcatataatacttctcctcatctctctaccaaaatgaccccgtcaaggtcctttatggtagagaccctcctactgtgatacgggttaatcggggagcctcacctgttgaaagcttggaaaacatgctccaagagcgagacgcagtattagatgccttgcagattaatctgattaaagctcaacagaaaatgaagagtagtgctgatgctacaagaagagaggtgcattttaaggtgggagatcgagtgtacttaaaattacagccttaccgtcagaaatctttggcttaacgcccttatgagaagttagccgcccgtttctacggaccatttactattttacagaagattgggcaagctgcatacaagttacaacttcctgtttctagcaaggtgcatccggtgtttcatgtctcccaactgaaacaggccgttggttccattcccgtttcagccactattccagagcaattgtcttctgacttggagttagaggtggaacctgatgaactcctcgatgttcgtagtgtttctagaggccagcacacttacttggaagctctcattcagtggcagggattaccatcattcgaagctacctgggaagatgtggctgctttccatcaccattttccatccttccaccttgaggacaaggtgaaactttgggggggtggtaatgtgatgcaccaaactaccactccactactcacctattagaggcgtaagaaaaagggggtaaatcaggaatagtttacaaattctgttgaaaggaatattttgtaattatgatgtcagaggttgttagcaaaaaggcagtagagtaacaataaaaaggggaagggaggagagaagaaggtattgagatttttgtaaggaacttggcccttgggagagttgggagcctctcgaaagctcaccattatcttgtgaatattttccttcctggttatatacaagaaccttcctctgtcaatttcttttctctctaatcttatttcttattctgttttctggttgccattgtttgaagttgcttgttgtgcttgagtaaatacgtgaagtggtgaaacccatctgaattcatcacatctattccaagtggtataatacaagcttgtaatccaaatctaatgagaaatctaagttatgaagaatttcaaaagaactaagtacccttgttttggatgcccaaggatttacttgccgctcaagttaatgctcaacgtgcaagatacaacctctttagtatcccaaggtagtttccataagaattaattgagctcaaatcaagaacaatatttttatgtattaatgtgaacacttcctgaattatattagatatatggtctgaaggttggaagaaagattagcttttaattttaagtttgagatagtttttagaatcgaggaaagattagctcttaacttgtaaactaaggattgctttataagtaaaacattagttatggaactcttaaaattggttttgaacatttctagttaaaaatcccatgtaattctcccaaactagcttaaaatctcacatttcacaagctaaggagagacaaatggcgttctcttgtgaaacaatctaaaattttcattaggctactgttttcaagtatttatatgttagaagtgccgcatataggtacataaaataagtttacaaacacaagtaggaataaggaaaactaaaagagaaacttcagccatacaaaaccggctgaaatcagctactactttctactttctagcttcaaaatctgattgcaagtctcctttaagccaatcaccaatgaaaacctttcctccacatgaagtgtgctcaaatcaagagaagaaacccatcattcgcctatagctacctgggtcagatgaagatacggcaaaaaaaacgctggaaatcagtgaaccaaaataagcaccaattggatgctttctgtccttgctacattttcttctcataggactacttcaagccatacatgaataagcagttagatccagctcctagcatccatttgatcgtacaaatgagctccaaaaagataagtaaaaccaagcagccaaaacctaattaatactaatgatgaattagttgaatagctaatgacgatgaagcaacactttagtaggaatagtgttaattatgatcaatgctacttaatcttctgattaatttttggaaaaatgtcatatctaccttctgtatacacttattcataactatatcgtattattattatttttaaataactaccttttaagtaccaaaacctaagaaatcaggcacttgatggattccatccaaagatccatttggcggggcccactaactgacttttgattttttgcctttcctcttttggttaatctcaatggttcatcaataacaactcaatcttctccccatttcatcaaatcatccctaaatcagaactttttcaaattcacccaaatgaggttatggaaacctctaccaagtttattcgaccacttttagtctagctcaaagttttacacttgcttcaaaaactaagatttattaactttagaaattaggtttttatttttattttttatttaactttgtaacaatcttaaataactcaggtgctttctagagtttggctttaattgtttttcccttggttatgtgaaagaagtatgactactttctccaagactaaagtagagagcaaaaaatgcaattctggaatttcttgcaaaagaaaaggaacgagttaatgataatgaaaaacaaagaaaatgatgagaagagaggagctgaatcaatcatgatcatgtattttaaagttttttttgctattgaagtgacttaagaagaggaaagaggatgagtgaagacaaacaaaagaaaggataaatagagggaaatcttgggcttagaaaggtgaaaaggtaagaagatgagttagtgggccccaacaaatgtatctttggatataatccgtcatgccactgtttggggcttgcttaagtccatacattacttcactaattttacaaaatttattttcttgaccaagaactgaaaaaaccttcagtggtgatctattaggttttggaagttaaaaggtagttatttaaatgtttttaatataaaaggtagttatttagatatttttaatataaaaggtagttatgtgaataaaagtgtatataaaatgtaattttttgacatttttgccttagtttttcttgctaattcaccttttcaacttgaccaagttgctatgaggagaaaacgagcaattattaagcaaatcgcaacactagcattaatccatggcccatgaaactctccataattagagattggattagcacttagtagaacttcttgctcctgctccaggtttccattacttctttatctaagtgcatcaaaaggttgttgggttatgaaaggtggtggttgtgtatagtcattgtcaaaatgttgttaatgcactctatttagaggatgagggattgaatagttttcacctcgtgacctttcattcctttttaaaaaaattgataatgtgtattggtcctatgactgtatgaatggtaataagctatctcatgagctgttactatcttcctcagagtctaggtagaagggtttgggctgataattttctactatgtgcaattagtttgttggatttggatatgctagttgatataggtcctttcccttgggccttctcttaatataggcctacagtgtgattgaagataaatcttctggagaatataagaacaatgagatggattggttagaggttgatttgttcttttggtgtaagactatttcgggttctctattggttatgttcagacgccagaatatgtgttggtgattgttttccatgaacatactttatccgcagagacatttttcttttttcttcctataagattatatttgtttcctctcttggtgctcatctcagtgtctctactttacgttaaactgttgacattacttgacaatgcgtatatttgtcgcatggtgctcttccctcactccacgtcgaccccatacatcaaaaaatgccattaaagaatattcgaactcacaaccttgtgttgaaagaatggaatccctaccaatgactcattaattcattttctctttaagaaataaatgatttcctcacaaacttttaggctttaagagcccaaaagataaaaacataaaataagatagacatcaacgtcaagattagccttaaatgcacaaagcacatgtcaaatgattgataactactcacgagttgcaactctttgggcgttgcctaatattaattggatctcttttaaaaattgttggtggttatggttggtggagaggaccatgtaacttttagctggtcacaactggtaatgattgtcacttttactgcccataaaaaaatttaaactgttgaatatgtttctggcagtggatctgacaaatcctttacaagttggcgtccattttgttttgccatgtgactcaattataatacgtgagttttattatccaccaggtttggctcactaatttccggattaattcaatctaaactgtctccaaagaaggaaaagggtggaggaggaaagccttcttctaatgaaaagacacgcatacgtggttcgttttctttccagggtggaatgcaggtattagcatgtagctttcattctgttaacatttgtggttcttccagacatacatccaatgctttttttttttcttgctataaccataaacattcttgtcatgaacattctttaatactgttgctgagcttagtgtattcgttcattcatgtaatttcctctcttgaggttaaaatggcatacagccttacaacctatatccataatgctccttagagtagaatccctaggttataacatagtaccacttatcaaaataaacatggcacacactgcaggacaagaagtaaatccacctagagaactgagcacctagtagtaaaagcagcgatacattactaataacagtagcagggccataagagtagtaaatgggcctcatttcaacactccccccgtaatggtgagagagaagaagcagtctgaactcccagcttggagagcaaaatagagtgttgctgaacagggagaaccttagtgaaaacatctggcacttgatcttgagatggaacataggtaggctgaataaccccttcttcatttgtattgtccctcaggaaatgacaatctatgtctacatgcttggttttctcatgatgaactagatatgctgctatggcaagagcagcttggttatcacagtagataggagtagcactggactttttaatgcgaagatctttgaggagttgtttgatccacatcacctcacacacagcaagagccatggatctgtactctgcactgaccacaagaaattgcctctttgactttcaagatacggggggagtcaccaaggagcacacaaaaccagatgtagaatttacaacacccatcccattcactatcacaaaatgctgttagttgagcactagacttgttcgccatgagaattcaccctgttggcagcttgaagatgcacattagtggggcagtgcataaatttgcttaaatcatgtatagtgaaggcaatatcaggcattgccttgtaatagtgagataaatgagcttccccatcaatttttgatacacatcaggttgttgaagaggatcaccattgtcagcatagagcttgacatgtgagtccatacgaagcctcaatcgtctgcaatttataaaaccatattcatcaacaagacccatcacatacttctttagagataaaaacgatacttcactacactgatccacttcaatcctcaaaaaatatcttaggccacccatatctttcatgtgaaattggccagcgaagaaactctttgcttcctcaatagttgctaaactattgccagcaagaatgaggtcgtccacatacaccaatatagcactgaaacagtgagagttttgcttgaagaatagagagtagtcacacttggattaagtgaatacattttgctttaaagcagtgttagcttggcaaaccattgcctcaaagcctacttcaagccataaagtgacttaagcagcttgcacaccttagttcatttggtgtcacttctgccatcagtacttagctccccctctccttgaactttgatcctgttacatgtttcactatatcctggtgatagcttcatgtatacactatcctacaattcaccatgcaaaaaagcatttttaacatccatttgtttgcaagaaccaaccctctaaggatgcaacaacaagcatgtggtcatctttgctacaggggtaaaagtctgctcataatctattccatatctctgtctgtcacccatgattacaagccttggcttatgcctattatttgtgccatcagtgctgtattttgttctgatccatccatgtgagggatggctcatttctacaaaatcctagttccgttaggatttgtgttgttttcctaattctagtaggaataggactcctaaaatcctaatcctcctagttctgttaggagtttaaaagttttagtttgattgtaattctagttgtgttagaaatccaaatcctagattcatgtcacgtatggttagaacatggctagtaggataatttgtcttgtgatgtccatagccttggcatttgtggcacctaactttcaatagcttgtcttctgtctccttttctttctccttctttgaggaatcaacgtttttagagctatctaaaccactagcatcaatattaggtttaaaagtgctaaaagatttcgaatagttcttacttgcatacaatttctttttctagtttatgtagcgtcaccagggaacaaaaactcggccgttccgttctggaacggccgctttgtaacggatttcagagaggccgttccgttaaataccgttctagaacggtgatttggaattcacaccaaactcggcgcgatagcgttacgtaacggtgtaacggcgttccagaaccgttacaatcacataacgtccgttatttgaagaagaccagttcttttggtggaggaagaagaagagccaacgcaagatctatagatctgagttaaaatttgaaaataaaacatgtttttttatttaaattaaagcttacagaggatgtagaactcaaattcgagtaaacccctcctttaatttcattaggttactgcaaatcgaaccctaaattgcaaaccctaatttcgaaaaaaccctaatatgcattgggatgcaacgctgcttctccggtcatggcagagaaggtcgacgagtcatcttcggctgcttttagcactgtagctgccggtggttggcttgtttgcaggttagtgcttgctggttttctttctctcataccgatcatcttcttcttttctctcttctctttttcttttttattgtgtgactgccagtcacgtgataattgcaactcataaagtatctctttctctctcttcttttcatccctttttatttttctttcccttttagtttttattccctcacgtggaatcacctaattttcatccttttttatttttttagttacactcttacacagaagtatgttcaaatatcattatagtacctcaaatattgtatttataagagttttggacataatatgatatagaaagtaaaatagaagaaaaataaagtttaaatgtcacttgtgtgatttttttaaaaaaattcacgccgcgacggccgcgaaacgttctatttcccgttacaagccgttcccgcgataacgcgaccgttcccgcgaacgcgaccgcgaccgcgttttttttccttgagcgtcacatcttgcaagcttcttcaaaggtgagttatgtgtacaactccaatttctctccaatcccctccgtcctcatttaggcctccaaggaagctacttaaacattgatcttcaagttcatcaattttccaaagaatggataacttctcgaactcctttatgtaatcttcaacggacatattcccttgtttaagagtagaccattccatgtacaagctttgtttgtagttagaaggaacaaaacgtcctcttaacaactttttaagcttatcccaagtagagattttgggtttattagctttcacacgctgcctctttactccatccaaccaaatagatgcatatttggttaccttaagcacggccaccttgtatttcttttcttttggtgtctcttaatcccaagtagagcttttgcgtgtgaaagctaataaacacaaaatctctacttgggataatcttcttcttgtttccgaaacaactaattcttatggtagttaggaaagcaagaatggtttctaattcaatagggaatatattaattattattagtttaagttaaatagtgcacgaatctaaatagattattcgtctcaaaatctcacttaagtatagatttgtttggacatctgagggaagaagaagagagcgagataaaggagaattatcactcaatgaatccatatcccgagttttcccatttacttctttgaaagcaatatagttcacgaggtcttattatcagtctatggacataagagtaataatttaagggcaaaaactatgactttatgggtttaaactgatacatgttctgttaaactgatagatgttctgtgttaaaccgatactcatatattcctggttaaactgatagatatatgatttaaattgatacccgtctcagtcatgtcttggattgagacggtctgacacaagactttttgtgtattatatatctgattagaataaatttatcctgtttactaattattttatcttctccagacacttgttgacacaatatgcaatcagtttggtaaagatgaactcaaactacagtgcaaggtcctttcattgtcctacagtcataaggggatcccttcttcagaaaattgggtcgtgtcttctgtgtcaaaaaattccattgaagatcaacaatatgatgctgtcatcgttaccgtgagttttactttgcttactgctattgcaccaatctttcttcttttgacacactgataatggcaatgctgttgtggtttgaagccatgttatggggttttagggatatttatggagtctgatctaatatgttattggataaaattcagatctgtaacgtgactcaatgagattgaaaaaaattgaatcaagataatggattggaaaattaggagctaacctagggtctataagcgatccacttggagtctcataccaagcaggtattcgacattttaggtttatattgctgctatggctcatatgggagcctacatagggtctggtgcttattcctttttcttttgtctagttttggggctgcacatttctgttgtgttttgatatggatagccatcacctgcaattgcatggaggctgaactaagttctataggggagcaaacagtatctgttggaaatttattttcatattgtgtttttaaatgctataatccaaaatttgttgttcccctaaaatgcctaaaatacccttatgtaactgctccatctgtcccttaatagacttcccatttctccaatgcatgtttgccaatacacattttgtattgttaatatcaaaaattacatattagtaaaaattataaaagtttgattttcctaatgtacgcaatgagacgaatcaaacaagacgccatatgactatgttttttcttatacttcctatgttttttaataagtgacatgttttccttttagggaaatgtcacaataagtgacacatagctcaaagtagtaaaaatacttctcatttattacatctttgccattatttaattgtttcacctacctactttatccaatactcaaatttgattggttgaacaattggtcccaactttctctagactccttggtattccctttcccccactttctctctgtgtcacttattaaaaaatggaggacgtatattggaaaaaaattggaaggttttcttcacttatgaatagtggtaaaattagagatgggaaggctattttgggatggatggagtaatatttaaatttttaaaataatgtcattgttttagtgatgaaataaaattcaaggctattttttctagtaattatgttatctgtacatcaccacacgtatcgcgtgcatataagactagtttgatgatattccaacactgttcgaaggaagtcaggcatggaaccatgtttgcttccatatgggaaatattttgcttactctccttcaaacatctacctcattatcccagaatgattgatcgaatctaatacaaatatacaattgatcatatgccaccagggaattacatcaaattaaatttttatagaaggggaatcagtcatagcctcatagggaacgaataagtgatactcgccagtttctttcctggttacttttcctcttctcactagccatcctttatgtatgggtatgctgcatcattcctgccactggttgggactcccgtttgaactatggggggatgggaaagctaagccatcatcttcaaattgagtttcttgagaatgtaagacaccatctgtaagatgaatatagtgcactctatagtcaatgtcatgatctttatgggtttatctgctgaaataactgtgatatacccagctctccatttacaaagttttcctacatattaaactcttgcccgcaattctagaacttcattgtagaacttttcctacataagcatcatttgtcttttctgtagtaaaagttagaaagagctttattttagaacattcgtttttagttttctttgttgttgattactccgccacttttaatacttttatgattcaagtatttgacaaaatcatgtaatttaggtcctctgctgcatgcagtctataccctctctctctctctctctctctctctctctgtggttgtgtcttacttgttgagttactaactccagccattacataaagtaggctggcattatgatgagcaaattactcaagaccacatgttagctcctttttcttttctccttattctgaaaggcaaatataggtccatcttggtgcttctcatgtcataagtaagctgaccccctccttttccagggaataggacaataatccaaaagtgagggttttacatgttgggatttgtgaagtttcttattttacttaatagccgagtcagtgttacaatacatagtaccgtgttacaaaatagtatgtaacaccaagcatgtttatgtgcaaaattgtgcaagactttgttgctggcacgccaagggctgttttaatgtagtttacttattcttttaggtttttcagatgacaatcataaagggaattaggagtgtttttattgtagtcaatccctattgtgctacaacgataaaagaaaaaagcacaagactagaaggagaagtaatgtctaggaaagactcctcacctggggttgctagtcacctacacatcttagaaggcatcaaaccaaagcttattcccctcgactgttttcgggagaaaagaagacaaaattgtttctaacttatactttaccagtttcactacagcatcagaaagaagcaaaatatgctcccacaacacggcgaacctagctttccagatgtgataaaccagaccagcaaaatgattattttcactagagctttgagtctattttttcggtttttccccttcttcctggtaatgtcacgccaccaagccatcatctcaattttttgagatttgacgtaatcgctcaaatagctgagtaagacacttcttgctctaaatactaataaaaaagaggtgaatgtgggtctcagccatgttactcaaatcggataaagtgtctactcttattagggtttttgggtgttggactcatccatttttttttgtaaaatgtcaagattttggtttgaaatgagagattcaagtgtcgtgacatgagtcggcacgcaacacttaaacgtgtcgaagtaacagagggtctcagacaatcaactttaatcaatcacgaaccccaaaatttatgcaacctttgctcatattcagtctctgtaaagcactcaactgcagcacacccacccattcgcttcacctacagcaggagggcacccaagtaattgctatgatgagcgaattattctgttttgccttgctggaatattgctgttagatttgctgactcactggcagttaattatagtcagagaatgagaaatatcctgtagagagagaaagggtatcttttgtatttagctctataaatagctaaggaagggaagggcattgagagtttatgatattataataggagagatttagcctctcgaatgctgataggagcgtagctcttgttggattatcaatactactctgtttgctctatctatttctactcaggttccttcttgtacagtggatccctgattggatttacttcatcaaccagcagataaaattatttgtaggcacattgaaaccattccaaacctaatgaggccaaagtttatcacaaagaatataggagccaaatgtaggcaacagataagagtataattgccagaagttgaagactccaggtattgttcagaaaccttaatgcatatcatcattctgacactagattttccccggagccaactaacaaaaatgaattaaagagattaaggctatgtttagttcacctgaaattttctgatctgaacttatctgatctgatctgaacttattttttctgatctgatctgatctgatctgaaccaatctgattacaagatcttatcttttagatttttctcaatatataagaaaaaatatagtcatgtggggtcttgtttgattcgtctcaatgagtactttattaatattcaattattataatttttactaatatgtaatgaaagatataatgatttttaaatataagcatgatctgaactgatctgatgtgaacttattttttctgatctgatctgatctgattagatctgaaataagcaaaaataaggtgaactgaacatagcctaagcaacaattgagggaaaataagatcattatggctaagataagataaatatgtaatgataaaatcagagtaattatatcagttacactctcaacattcgtcagattgaggtttcctcccaaaatgccaacccacttttctgtattttcacgtccttctctctacccttctaggtatatattacatcagctgtaaaatttttgaaccaactagtagaatactgatctaccctcaactgcctcactttctcattttttctgggcctttttctctctagcacaagtccacataagtgatgcatagcagaaatataattccactagtcatcctcaatattgatataacaaacacatcacccacatattatcatttttaatcgctgcatgcgaggcatacttacccaccaatcaggatatgcataacagcgttcctaattccaaaaccaccatatatcttgggtttgcaactctcatccctagcaacaaggggactttctgaaaaagtggcagattccgcccacaagtagtttgtacggacacctttattatattattaatatcatatttcggcaacacaaattaccagcccagtaaaacatgaattgacatgagactaacaaggggcccaatctaatatcgtacgtctgtactaagcaatgtataaaaaaaagctcaaggtgcattgatgcaatagggatcctaatgtgcataggtgcgcctcattgaagtgaggcaccactaaggataaataaaaaagattgatgtaaaattaaattgtgcaccttgggtgcgcctcgatgaactttttttgtgtgcctaagtgtacctcaagtacgcctcattgatatcgcctcgcctggcagaaaacgagcttgaccccaatcgccttgctccccaccgcctaggcgtgcctcagtcacactttttaaatacattggtattaagtactcagaatggcaaaaagaaactttgggcattaattagacatttcactttttgtgcaactatttgtgacttcagagattgatatgttttctacattacagacttttgtgatggctgcatggtctccactgtcaaagaacattagtttaagtagaagaaatattgctctattaccttcctccctctacaaacaaaatcctaaaatgtggttatgtagtgccaattcaaacttgtagatgcatgactaatgctttcattatgctgtgggtttttatactatgattcatgtccaattacataacaattagctggagtcaggatatgtcacggaaattttaagcctggcaggatgattgtttatattttctctttttcggtgtttaagtcaaagtaaacttctaggctgctcttttataggctagttgggctgttggggagatctacacattaagtgtgaagaaatcttgtctaactccagtttggttgagaactgtaagctgtcataacatttgttgcatgatgaggccttgtgggattatcatgttagctgtaaactctaaacttacttgaaatctagtgttgtgtctccttatttctgtagtcaaaattgaaccttctgtacgtttttgatacctgcgactagaatgatggaattctgaattactgatactattacaaccatctgctaagaacgaagatgactcttagctaatttctcagcagatttagagaaattaagaagaattactaatgaatatttaaagagaaaactaccaagatatgattgtattgatgaaaaacaccaattacaacctaaccaacattcgagaggttggagctctcccaagtaaccatttctctcactaaacttatcaattttcaagatgccttttccattctcagttcctctatatttatactactccccttagcaaactacccaacttattccccaagtaaactaaagagataatatctaaaatacccttccccctacaataatattagttcttagcattaccggccccctaaacttccaccttgtcctcaaggtgggtcgtaatcatcactaaattctgggcctctactcgtatattcagtgtcttgcagcccttcaggccccaagcctaggttatgcagctcgtgttgcggctcctcctcatatagttctctggctggagtgagtgcctcaactataatgaaaaagtcctggaggtggggaaggaaggagtgtctgaaatggtgtggtgtgctgctggtgttatgggcttgtgcctgaaagttttgggtttaaagagatggagtggagaagagtggagaagtgactggagacgtaaaagaaggaatcataatttttgtaagtggtgggttgaaaaagttggtgggaagaattgtttttataaaatgtagtgtaatggtcgaaaaatgggtggagtaagtatggtttttggctggggatgtggtactgggttgaaaataaataggtctgagcttacttgtaaaattggcctcaacatgagcaggcccaatatcttgagccaattccccaaaagctggcaatagagcactcttaattgcattgttgtgggccatcgggctccaaacatatattcggaggagccggacttctttggtgatgtcattagcttggcccattgcacactttcccttaacagcctcaagatcttttcccacttttgtaccccaaccacgtggcttcaccatcctttctttcttgcttttgtcacttttttggcaatatacgagtttgtccttactaccctcatcttctaatgttggcttcctcaccaagcttaatttctggaattttgtccaccaaatcccaccacccatcgtcaacaccatacctatctacaccggccaagaagcctggtcctccacccgaattttcgccacagacaaagcctgaacaaccgtcagttctctcaccggagaagttcacaggtccaccacctgacccactagttgctgatccacccttcacaaatctccctcctctggctgccacaagtagtggttcctccgtaatactcatatttctcgtccaagagccctggaccaccaccggacccacttccaccggcaccaacttgttcaaatgatacttctctttcttttccaaacagcctacttggactggaaaaaccactgcgattgtagcctccgccagatctgtagcctagtgcacctaacgtgcttccaactgcaacccaatagggatggaaatggatgggattcggggagggtggagcatcacccgcatccgtcacccgcatccattcgctccacccgctccacccgcatccatccatccgtcacccacgggtgaaacgggtgggtcggtgataaacgggtggaaccatttagggggtgtttggtatcatgtttttttacaaaagaaacagaatcaagtaacaaaatccgtttctacttgtttggttctatgttgctcagactcgagtacccatgtccgacacgggtacgtgtccaagtgtccaactcagctattttctagaattttttatattttttaacccaaaacaaagtgtccaagtgtcccacccatgtccgactcccgaggatccgacacgggtacttgaggtgaaatgaagagtccgagcaacggaggtttggttagtgtgtaaagtaacaattaccgttacttgaggaaaacacatccccccaagttgtttccattcaaaaacctaaggaaacaaataacgtttcactcctcaaacaagaggaaagggaatgggttatatttatttccattccattaggataccaaacaactaataagggtaacacttattattatcctttcccctccttatcaaaatcctttccattccgtttacggtattcataccaaacacccccttagtatattttctaatgaaatttgtgatatgatatgcatgatataaaataattctatcaaaaatataaaaagtaagtaaacttacatgtacaacttaatagatgggtgatgggttggaggttaaacgagtgatggatcgggtgacgggtgaagaaattctcacccaccactcgctttccatccatttaaattaggtttttcatccatttaaaaaaccgggttaaacaggtgatgtatgatccatcacccatttccatcctcaaacacatcccgatttgtttactgcaccaccagatccaccagtataaccacccgaaaaatcatcatgccttctactagccttgtaacctgctcccggtgagaagcttcttccacaagtggtggtcgctggacctccatctccttcttccccaaaaaattttccatgacacccactcgacccttcatctgtgacaacctcttcttcgtccacctctgaagttttggggtcgtcttcctcctcaagctcctcttgaagtaactttaacttccgttggatgggagagaacgcttcattgattatcttcaccagatcttcttgaagtttctcgaaactttttctcacgttttcctctacctctttcgtgatttcctttccgatctccttcatttttagactaggagctcttgcgattccatggcagatttctttttttaaaacaagaaaatcaggcacttaatctcccagaatagtggtgctctgataccattttctaagaaccaagatgactcttagctaatttctcagcataacaacaaatttagagaaattaagaagaattactaatgaatatttaaagagaaaactactaagatatgattgtattgatgaaaaacaccgattacaacctaaccaagaggttggagctctcccaagtaaccatttctctcactaaacttatcaattttcaagatgccgtttactactccccttagcaaactacccaacttattccccaataaactaaagagataatatctaaaatacccttccccctacaatattagttcttagcaccatcaaactgggatggatggttttgtaaggttccaatttacttctccatcaaaatattttaggattttttatctcatgtattttagagtttcctcgtccctttttatctgataagattcttctgatgatttgattttatggtaggctccaatcagcaatattaaagaactgaagattctgaaagctggagttccattttcacttgacttcattccagaggtttgtatttttatagtggttagacatgcttcccctagttttcaaagtaaaagcatccttgttgtgacgatattttttcccttgtttttgtttttattattatcatcacttatttccattttctattttccatgctgataagatgttcatcaccataatcttgtggtatcagaagtgtttagtggagtttattcactacacatgcagttgttcttttgccatgaccgccattcattttctcgtcaaaacaaatctatgaagtttggttttcagactcatggttcttgtagctcttgtgaatttttttttcttctccttgcatgcattcttcaaattacatattgcatataccaggtgctctcctttattttatatttaatttttaaaattctatcatatattttttaatgtcaaacctcaaactaggggttcactgcatcttaggcttaccaggctaatatttctttacttaaccttttccctttatatttgctatcctcttgtgtagtaatcaccataagaagggtacaaactaaattaccctcccattcttttgtatcattctgaaatagtgtcacagagctttgatttttttgccctcatttaatctggcaaatgttctctctatttttttttttttactttcttttgacgggattctcaggcaattgttacggggagcagccagtcacactgtttctgtttattatgcaggtgagttacctgcccctctctgttatgattactgcgtttaagaagaccagcgttacaagacctcttgagggcttcggagttcttatcccttcgaatgagcaacataatggactgaagactctcggtaattgtctggttcacgtgtgtagcgaatcagattttcaaaccctgatttcgtaacattgcagcnactctgttttcatctatgatgtttccagatcgtgctttctccgatatgtatctctatactacctttgttggaggaagcagaaatagagaacttgcaaaagcttcaacgtatgagatatgcaatgttttaaatgtatgctatagtcatcgtttcaaccttttggtgcctttttcttactaatttatcctcctggtttaatgatcttagggatgaattggagcaaatagtttcgtctgatctccaccagctgttgggcactgagggaaaacctacttttgtgaagtattgatatctttcacccaacttaacatgatttgtgcttataatatgttaaataaagtaactgaaatcctgaaattaagactacgaaactgtatggtgacagtcatttttactggaacaatgcattccctttatatgggcacaattacgactcagttctgagagcaatagaaaagatggaaagagatcttcctggacttttttacgcaggtaatctgtcatttgcttgttgcgataaagttcatgtacagttggcatatcaatcaacttgcattctttcttgctaactccaaacaatcaggatcattaacttgtaggctgcagcaacagagagtatctcccaagttgttaggtttcatgtaacctcgtcgctgagatgaaatttccgttggctaaaaagtgaaagttttgtattgatgttacccaaaacaaaagtattttgcatgttgcttgaagttttggttgtttcagatagtacatcctttgacatgaaaataaatggaaaagcgtatgtcaagcaattatcatctagtttctttgtttctagatactagccgcatttgatcccagatcatttttgaggaagtcagctgaaataccgtagctatccttcagttttcataataaaactttaatggatctgatgtacagtaatttagtgtgcaccgggttaataattgatattaacttcatatagtgagtcttataaagatataatgaacttatatacaatatagtggattttattaatggaaaacatatagtgaaactatatgcaatatagtatgatacataaagacttagacaacaagagcattcgaaattacaaagaacaaaggaaagaacaattgtatcaaaccggttcgaatgaacaaacaaccaccacttccacaatcaatgtaccaccaatcaagactaaactataacaatgagcttctagtttaagtctactttgagttttaatcaccaattcaacgattagatgatcaaaattgcaaaggttaagagttggtcaaacctaaccaagagttacactaggcacatagctttgttaggagtatattagtttatgaattctagttaagttagaaatccaatacctagttggattaggattcctaattggattagaattatagtttagttagaattctagtaatagtaggcgtgtgattaggagatataattagcttaattcttatattgttagtttaattcttatcctcgttttaggtttatctttagtcgaacttgtaccctatataaggggcctttatttcattaataatatagtttattttgagtttaaacctttacttgtgattgtttgcttgagaggttattaatcgaaccattaataacttttcaggattgttaagtttttagtgttaaacatcttaatttcaggagtgattttaagagtgtttagattcttgtattcaagtttcaggactgatcttgaatcaagaaatatccctagtttcgactaatatcataagtagttcgaattcttggagtcttttcttcaagattcatattcataacttgattatttagacttcttggttttgtaatcatatcaagtggtatcagttttccagggaggagaggatacaaagggttctctttgatcaaagaagatccaagggcatcaataagaatgacacttgcaataagttcgagtgatacaaacaacttcaagactcgatcttttgctaccaagaaccaatcttgacgcctgaagattgttaggacaaaggataagaagtgtttctacatccaagattgcattctttacgtccaagattgcgtcaagatccattctttaagttcaagaaaggagtagaaagcattcgaacactacttaaacatgacatccgagatggataagctggctatggccatgagtgccttggcacaatcacaaactgagtcacgcaaccacatgggtaggatggaggcacgtgaccgtggattgaaactagatgactatagtggagatggcaatccagaagacttgttggagtggatttgccaactaggcaaagtgagtgattataggggctttgatcacaagaagagattcaaggttgcttccattaggctcacgaagtatgctggaatacggctcgaaggattgcatgcacaaacttcttgcctaatgactatgaacaaaaacagttcataaggctcgcatcaataagccaaaacacacttagtgtacacgaatacagcatggagtttgacaaattagggcttatatgtgacatagaagagaaagagcaatacaagattgcaatgtacattaaagggttgaatcgatatatagccaagaagatcgaagtctcaacttatcacttctttgaggatgtgactaaattggctaagaaattcgaagagcatgacaaagaagaagggcctaagagttcttacacacctaagtatgactctagtgctaaagggaaatcaacagttccctactcaaggtggtcggaaagacctaagaaccccactacacctaaggaggacactagcatggagaagacaaaagtggccgtacctaaggagagtttaattttgtgttttatacatctttgcttaagagcttaacaattgaaactattaataacttttcaggatggttaagtttttagtgttaaacatcttaatttcaggagtgattttaagagtatttagattcttgtattcaagtttcaggagtgatcttgaatcaagaaatatccccttgttcaactattataattgatcttattcgagttcttggagttaatttcttcaagattcatattcatacttgattattagacttcttggtttagtaatcatatcaatatcattagcattaatttacccccagggagattaagaaaggattagcctaatcaaggcgcttaagaagtttttaggaaaaatcgtgcttgttaagcttaagaattgaacttctttcaccatttgcccttgattctcttgttgaactagaagatcttggttcatagtagatgctcctgcatcatagtagagcatttaattttaattttttaacatgcacgaagatgtaggtagtgtagtatatatcgtgagacgtggtttaacatatagaaagatgtagtttctgcatgatatagtgagtttttgcatgatatagtgaatgtctgaatgatacagtggatcgttccgaattgttgtagtttgtatgatatagtatttttgtgaatgatatagtgagtttcttcatgatacaatgggtttctgaatgatatagtggattgcttagaaatgatatagtgagcttttgtatcatgtagtaggtttctatgtgatataggttgttaaaagatgatacatgcttttggcctcatgtactctaatgttaacgtgaacccggtccttgcaagtcaattgcagttttttcaatattaagctatttttttttttttttttttttttttttttttttttttgtacgggaatatttagcatctttaccacaaacataaccatacgaatattatgcggaaattccagtctgaagtcttaacttttcaaaattaaaagcttctatattatttttggaatgaaaaaaaatgagctatggcatgttattttgaaatacaatgagtctcaaggtgcatagtggcttcaattctacgaataatgaatggactactgatttctaattttttgttccgggcttttgcattaggtaaccataaagatggactctctgtgggaagaactatttcctctggatacaaagctgcggagcttgtgatatcctatctcaactctacttaagatgcctaaatgatcgaggagactccgtaagtcctttctctgattctatctttgaactgagtggaaacacgactgtggtctaaagtagttgatgtctcagatatccagaaatggcgttagtgatattcaggagctgtccattgaccctttgattcattgttgcagtttactgaaagttgttagctggtctcagaaaaacgaaaggaaaaaagggggaaaacaaaaacaaagaaacgtagattgtggtgttaaaatcaagaattccagagatttgtaccttctttatcagttgaattgtttacagtgtgaatcaagaagttagctcgaccttcttttcttgtgaatggtaagatttcgtgatcatcaatacttgattgtgctgtttgcaacttcaacggtaagatttcctgatcttacagtttaattgcttgtgctgtttgccactt

SEQ ID NO: 39 - DNA, 1575 bp, synthetic construct
  misc_feature 1..1575: note = G398A mutated Beta vulgaris PPO2
  variation 1194: note = n is any nucleotide
  source 1..1575: mol_type = other DNA
atggtaatgctatacgattctcacctctcaggagtctcaactcatcttcaactatcgcaggcatttcccaggaagaacccattaatggccaaagtgtctgagccgggtaaacccacttctgctaaaaggattgctgttgttggtgctggtgttagtggacttgctgccgcatataagctaaagtcccatggcttgagtgtgacattgtttgaagctgatactagagctggaggaaaactcaaaactgttgcaaaggatggtttgatttgggatgagggggcaaatactatgatagagagtgaagcggaggtcacgagtttactcgatgatcttgggcttcgtgagaagcagcagtttccaattgcacaaaacaaaagatacattgcgagagacggtcgtcctgtgctgataccttcgagtcccattgcacttctcaagagcaatatcctttcagcgcaatctaagctacaacttatgttggagccattcctttggagaaaacgctatgcttctaagatttctgatgagcatgctcaggaaagtgtgggtgagttttttgagcgacattttgggaaagagtttgttgattatctaattgatccttttgtcgcgggtacaagtggaggagatcctcagtctctttctatgcgtcatgcatttccagaagtatggaatattgagaacaagtttggctcactaatttccggattaattcaatctaaactgtctccaaagaaggaaaagggtggaggaggaaagccttcttctaatgaaaagacacgcatacgtggttcgttttctttccagggtggaatgcagacacttgttgacacaatatgcaatcagtttggtaaagatgaactcaaactacagtgcaaggtcctttcattgtcctacagtcataaggggatcccttcttcagaaaattgggtcgtgtcttctgtgtcaaaaaattccattgaagatcaacaatatgatgctgtcatcgttaccgctccaatcagcaatattaaagaactgaagattctgaaagctggagttccattttcacttgacttcattccagaggtgagttacctgcccctctctgttatgattactgcgtttaagaagaccagcgttacaagacctcttgagggcttcggagttcttatcccttcgaatgagcaacataatggactgaagactctcgcnactctgttttcatctatgatgtttccagatcgtgctttctccgatatgtatctctatactacctttgttggaggaagcagaaatagagaacttgcaaaagcttcaacggatgaattggagcaaatagtttcgtctgatctccaccagctgttgggcactgagggaaaacctacttttgtgaatcatttttactggaacaatgcattccctttatatgggcacaattacgactcagttctgagagcaatagaaaagatggaaagagatcttcctggacttttttacgcaggtaaccataaagatggactctctgtgggaagaactatttcctctggatacaaagctgcggagcttgtgatatcctatctcaactctacttaa

SEQ ID NO: 40 - protein, 524 aa, synthetic construct
  REGION 1..524: note = G398A mutant protein of Beta vulgaris PPO2
MVMLYDSHLSGVSTHLQLSQAFPRKNPLMAKVSEPGKPTSAKRIAVVGAGVSGLAAAYKLKSHGLSVTLFEADTRAGGKLKTVAKDGLIWDEGANTMIESEAEVTSLLDDLGLREKQQFPIAQNKRYIARDGRPVLIPSSPIALLKSNILSAQSKLQLMLEPFLWRKRYASKISDEHAQESVGEFFERHFGKEFVDYLIDPFVAGTSGGDPQSLSMRHAFPEVWNIENKFGSLISGLIQSKLSPKKEKGGGGKPSSNEKTRIRGSFSFQGGMQTLVDTICNQFGKDELKLQCKVLSLSYSHKGIPSSENWVVSSVSKNSIEDQQYDAVIVTAPISNIKELKILKAGVPFSLDFIPEVSYLPLSVMITAFKKTSVTRPLEGFGVLIPSNEQHNGLKTLATLFSSMMFPDRAFSDMYLYTTFVGGSRNRELAKASTDELEQIVSSDLHQLLGTEGKPTFVNHFYWNNAFPLYGHNYDSVLRAIEKMERDLPGLFYAGNHKDGLSVGRTISSGYKAAELVISYLNST

SEQ ID NO: 41 - DNA, 37009 bp, synthetic construct
  misc_feature 1..37009: note = L397E+F420V mutated Beta vulgaris PPO2
  variation 32531: note = n is any nucleotide
  source 1..37009: mol_type = other DNA
tattccatcgaatgtagcaaattgactgtccgttgcaatttcggagtttccactcgtcgcatggtaaatggtaatgctatacgattctcacctctcaggagtctcaactcatcttcaactatcgcaggcatttcccaggaagaacccattaatggccaaagtgtctgagccgggtaaacccagtaagtcaaacattcgaatcacaactcaagcaaatttgtcttgtttgcgttatattttgctcatttcagccttttttgtttttccgacctttgcatactgaatattgtgtgtgtgtgtgtgtggggtttcagcttctgctaaaaggattgctgttgttggtgctggtgttaggtaaattttcgtctcttgcagagtttttgagtcatttgggaattctatgtgaaacttgtaactcccttcagtccaacgaacgcagtacaattttctatcaaatcatggtcctaatttccaattttccatatatattgttggaattatattgggattgtctatcactattaatagtattaggatcaattgtagagaagcacagaaatttttgggatcgaaagaatatctggattgccacattaacagcagatataattcttccaattggtttttggttcttcctaccttgacttgtctggtcaaacattataaactttaacctttaatatccattaaagtaaactataggatttttttgtctaaaacatgcttatataacatgaaatttgtgagaaaccaccttatatatatttttttgcgaaaacaaaccttaaacaaaattattatcgtgagaacaaaccttatgccaatttcgatcattgacccaaggttttggcattgaccgtgtcatgaattttgttgggtttaaaaagtcatgtgtcttgcatacgaaatggtaaatgcgggaaccttgggtcaatgtttggaatccgcataaggtttgttctcccaaaaaatgtttttgttcaaggtttgtttttgcaaaaaaacttatataaggtgctttctcagaaatttcatgttttataaagtagtatttgacaaaaaaccctaaaatatattatagaattattattgactaaattgtgtaaaaatgtactcttctaaaagtacattatagtattttagtggaacatttgcgagaaactactttataaatacgatttttgcgagaaatttcctaataaaaaaatgtgaagtgcaaaactatcttattgataattttctactccctcaaatccaaaatactatgaagtctttcctttctggtttgtcccagattagtttgtacgcttccatctttggtatgatcccacttttattatacttattagttttacgtgagttccttactctatctcttttaacaaaaatactcaactatctctatccaataaaaagttccttactagtcctatcacatctgctttttaataaaataacgtttgataaccacacaacttatatccttaaaatacacgttcaaccaagtgttgagattaatttggacggagggaataaatattttttgaggcatattggtagcagtattcggattccgataggttgactatgtttccaatgttgaccaacacttgccttgcatgtaattctaactttgctcttttttattcttcatttccctcgtattccatatacaatgtttagagacccattccttcctcttctcttctttcccttccttactatgctttgccataatcttcctcaaatgagtgcaaattaatttgtcgttgatgtaggccaactgattgtagcacatcttcatagttcatacctcaacacactcgtaattatattataccctacatgttaaatggctcatgaagctttattttatatcatacttcctccgtttcacaataagtgtaacacttttcttatttggaataatcacaataagtgaaaccaagctccaaatggtaagaaaagttcactcttattacaaatataccaccaaaaagtaagaggggatcacaacttcaatacttcttcactctactttattgtggtcccaactttctctctctaaattccttggtaactccccactttctctatgtttcacttatggtgaaatggaggaagtattttgtagtggtatttagctactaggccttggatgatatacaatcatacaatgtatttatattcacgataatttgctgcccaccttgattaccatgatttccaccaattttatcaatttcagtacttcaccaccccgaatttatattttttatttccaaccttggtatctccatttgtctgagtgcccgatccatttgtatcgcctccagaattgaagaagcttcctgcagctagacaattaggaaggttaaaaaagtttggagatggtggaggatagccataataatcattgttgggaggtggaacttggaaggttattgtagggttgaagtccttgatgaagaagaattgagttcaaatgagaggaaaaaggagcagggaagagggacaataagaaaaaaaagggtaaactaaaatcacgtgtaaggcatgtgcagatcaacatcagaaagcatagtcaacctactggtattagggcactgatacctttttgggtcaaaatttttttacaaggtatttcatgaggtagttttgtccatttttttttttacaaggtatcgtctcattttttttttatcatttagtttctcgcaataagtgtatttcatgaggtagttttttccaaaatttcctcatttattataaaatacctcatcttttccataaataatgcaatgtctagacttttacgctgtttacacatgctcctttgaccatctattgacacacaaggaaaaatagagtagagtcatgcaggatcttgttagatttttctcgatatatactttcaaaagatcaatttttttataattttttttttgaggggattttttttttataattatgtacttatcaaaggtcaaagttgtgcaccgggaagcataaaactctatgtgttgcaatttacatggaaggggaggagtataataagagaaaattatggtaaaaggttcattcctggagatcatgagaaaggaagtagaaagaacaaaaaagaacaatgggagtgcttttcaatgtttgttgtacgtagcatttattcatttgctataatgttttgtgacattgtagtggacttgctgccgcatataagctaaagtcccatggcttgagtgtgacattgtttgaagctgatactagagctggaggaaaactcaaaactgttgcaaaggatggtttgatttgggatgagggggcaaatactatggtaatgtttttgattattgcaggtcttgcactttagcgcacaattaatttctggatttttttttgtactgtggtggttatggtcatcaacatgtctcacccactgtgcttgcagatagagagtgaagcggaggtcacgagtttactcgatgatcttgggcttcgtgagaagcagcagtttgtaagtctttcattatctgaatggcacatactttatttcgaaagattgtaattgccttttctttctagatggcttcatcttcatgttgctttctgattcagtttcgtggctaactttccaagtttgtctgattgctaactctgtcatagccaattgcacaaaacaaaagatacattgcgagagacggtcgtcctgtgctggtaagtttgcttgttttacttttgacctcttttaagatctttcaactctggagcctggaaacatggtgatgcaggaggcaagttctctctattttacatcctttcttctctgtatcttatgacatttgcctcttattctgtgcagataccttcgagtcccattgcacttctcaagagcaatatcctttcagcgcaatctaaggtcgttttatgttaagacatacttgatgctgagagtttattgaattcttaaccttcttcttattttttttttatttttttagcaaaaggtaagtatattgcatttaccaaaaaacagtatgtacaccaccacagcagccatgtcagaatctagaaataccaccgaaaaaatcctacacccaaccagagacagttatattatatcctactcctaagtttctgtacccaatttacatcaatattggtccatttacaagatatttttataattcacagaagcacatcagttttaattagtttaataatgacctctggatgaataaccaactcagaccatatagccttattcctggctttccggaagttgtacgccagagcagcaagcacagcaatgcaaacctgtttcttatacctccttttatgtgtcttagcccatctcttatagctagtgaagatacagtcgtgtgcacaggattgaaccccaatccaactagcgaaagcctcacaacattatgactataaatacatctgaagtataaatgctgcacctttttctcctcttgcctgcacggtatcagaacaaatcccagctttagctaacaattccctggttttcagtttattcaatgccatcatgcaagcaatgaaagaatgttttggaacattcagtttgttccaaacacagtgagagcaagggacctttcctgcagttccacttagccacttatatccctgactaatagtatgactctttgcaccgtaaattgatttcaacttaactttttcataagcagtgaattgtgtgttgttagagtgtctagctgtctaggagattgggagaaaaggagggaccaaggagatagaaacacacctttgtgtttctttgtgtatttactttttagggtgggtcacgttttctgagaaatttgggaaaaggaagaaatagtaacacactttcccatttgtataacctgtatactggagctccaatataatttgcatttttttttgagctgcaagaatatgttgacaaacagttattgcttcttcctcagctacaacttatgttggagccattcctttggagaaaacgctatgcttctaagatttctgatgagcatgctcaggaaaggtaatgtcaagacatgtgttacctcgccttaattttcgttccaggaggtgagcatgcatttagaactaaaaggcacaaagactgttggtggtcttgcctgttcaaatataatggagaggagttttcgctacatttaccctctcttgaagtggggttgaaatatagcatcaagttgaatgcttgattaagtttaaaggacttgtgtaactctttttctgtttactgtgattacatgacctggttgattaacataatggtctgtttatctgtagtgtgggtgagttttttgagcgacattttgggaaagaggtaatggtttaccatagtatttctgctttagtggtaaattgtaatgttgctgataattatacttcgctgcagtttgttgattatctaattgatccttttgtcgcgggtacaagtggaggagatcctcagtctctttctgtaagtgaacattttgtgcttcactcccaattttttggaggctggaaatagattcttttccagttgttctgtcaaaaatagatgtagctttattttgaatttgaagttcccaattgttcattttgactattactgattattgctaagagtggcattatgctattatgctcctaaaagaaaggtgaattttgacctacatatagtataatgtatcaatattggtttaattgtttgttcttttgttccttttggtgctcatcttgcgccttgttctcatcgctcgttttttcatgttgcacttgatttaaatttgctcagcttaacttgtctttttgaatttatattacttattgctatattttactaatttcgttgaaactaattttttgctgaacttttcgttttgttgaaatcatttttctgaattaacttgattttcctgaatagaattgaattttggtgatcttaccttttctgcagccttttatttctttcttgtcctttttccaatctcatttttttatatttccattgtgttgacatcttatcattaactgtgcagatgcgtcatgcatttccagaagtatggaatattgagaacaagtatggaccataagacgtttattttaatcgacatgtatgtttcttagtttatacatatattaattctgtggtaaaaaaaccgaacaagaatatctttttttttttctatcatcaaaaagggtgaatatatgtagaggaaaaagatttgaatcaagatattagcctaaagcaataataatgttagtaatagctttaataacaaattcaaaacgtacattaatgaaccgagaggccggaaaatagttaaagtgaccactaagagaagcgaaggattcatgatgggttttcaacccagtagggcaaatttgttcaatgttctttacaaatcaagcttattaccttgtgggtgtttttgctagagatgaatgatagaattttccctagttggaagtcttttttggttactttatgggagctagtgatgtaatttgtttcgccttatggcatttcctaacatgtgcttttgtgatgtattgaagctttttttttgccttaatttatgctggattttaattttgttctttgtttcatttttcttgcttttgaaaaaaatatatagatatgtatatattaggattggtcgaggattttgagggaagggaaagacctaagaaaacttggatgagggtgattgatagtgatatgagtctatttgggatcgaagaaaatattcctttggataaggtgtagtggagggttgagggagcaaatttatgcagattagcttgacttaaagtttttctttttgattatttttcatttacttgtgttttgcaaacatttactcatgaatgatgtaaacttcttcaaccaaatctctggaaaaaaataatctacatggaaaaaacattattaatgttaacttgacagagatcccatccttgtgaagcagctagcaattaggcatctaacaattgacattttaatggacaggatagaatgtctcttgatagtcaataccctctgtttcattgtatcccatagctactaatctagtttgtatctttccaaagaaccattattttgaagtttcaccttgaacacccattttgaaccaatatgtttcttgcccttggggagaggggctaattgccatgttttgatgcggatgcaaagacacttgttctacctgagcctattgacttgatcatggatactctagggtttgaactcaagggaaagaatcaagtcttggcatgtgtggtgacatggcgtggggatggagtaaagaagagtcatagttctgttaggatatgttcttgcttgctacatagaatcgtagttctgttaggattgctatgatattatatctagtagatagattttatagttaattaggataaacatgtgatgatcatgttataataggcatgtgattagaggataggattagcttaattcttatcttgttgttagtttaattcttatcctagttttatgtttatcttagtcgaagttgtagccatataaagggcgttccattcattaataatacttagttttgctttgtgttttaaacatacttcttgattattgtttgcttgtgagctaactaatcaaaccattaaagacttttcaggagttttagtgctaaacatcttaatttcaggagtgattttaagagcgtttagtgatcttgaatcaagaaatatccttgttcttgttcgactaatatcagtggttttgttcgagttcttggagttaatctcttcaagattcttattcaacttgattgttgagcttattggtttagtaatcatatcaagtggtatcagttttccagggaggagaggatagataggattctctttgatcaacaaagatccaagggctatcaacaaggttcaaacattgctgcttgttcaagacttgatctttttctaccaagatgcattctttacgtcacaaggtagtaataacaagattaagagtggtttttacatccaagaatcaatctttcacgtccaagatttcatctttcacgtctaagattcattctttaagatcaagaaagttataacaagcatagaagaacacataaccatggagtccgagatggacaagcttgccaaagctatgcaagcacttgcaaagtcgcaaactgaatcacagagtcgactcaatgagaatactaccacaatcaatgggattggtagtaacatgaataggttggaggcacgcatggatgccattgcaaccatcatacaaaagaagcttgatcggaatagtgccaacttcataggtgccaattcagaggaagagttggcagaacgtgaagaaagatcatccaagactacatacaatgatgatcgtggcttaaagttggatgactataatggagatagcaatcgagaagacttgttacagtggattcgacaacttgagaaggtatgtgattatagaggctttgatgacaagaaaagattcaggattgcctccataagactcacgaaatatgctggaatttggcttgaaagcttcaaggcacaacgagccaagaaaggtaaagaaaagttgtgtagttggacaaagttgaaagttcaagcttaaagagaagttcttgcctagtgactatgaacaaaaatagttcataagactctctactataagccaagacacgcttagtgtacatgagtacaccatggaatttgacaagctagggcttatatttgacatagaggagaaagaacaatggaagattgcaagatacatcaaaggcttgaaccgccacattgccaagaaggtggaagtatccacttatcacacctttgaggatgtgacaaagttggctaagaagtttgaagaacatgagaaggaagagaagcctaagagttcttacacgcctaagtatgatactaatgctaaggccaaggctagcttcctactcaaagtggtatgaaggacctaagaggctaagaacctcaccccacctaaagaagacacaagagttgagaagcctaaagtcgtcgttccaaaggagaaatttgaagagatgagaaagtgcttcaagtgtcaaggaaggagacacatagcaagcaattgtcctaacaaaagagtcctcaccatgagacaatacctagctttgcaagaagaggaggatgtctattagttcgtccctgatgaagagcaaacttaggggaagaagaggaggaggatgcttttgctgaggatgatgcaaggctagtaggggtcaagaggcgcaccttacatgtcgaccatacacctagcatggagcaaatggaaaaatcttttccacactagatgcaaggtaggtgactatatatgtaatggtataatagatagtggttcttgcactaatgttattgtatctgaggtagtgtcaaagctaaacttagctacaagggcacaccctaagccatacaagttgagtttgctagatgatagcactggcatgagagtaaagaaacaagctttgatttcattctctataggggttataaggatgagttatggggtgatgtattgcctatgagtgcatgtcatctcttgcttggaagaccattgcagtttgataaaaaggtcatccatgagggggactctaatgtgtactctgtgttggttggttctaagagggtatgtttgcatcccttagctcctcattcagtggcgccaaagcaaccacctaagacaccaagttactttctatcttcaagggagttcgaacaagaggtggaggaagaaggttgtgcttatgccttgattgtaagacatgctgccacaagtgtcaagactactagcaatgagaagctcgaagccttgatgaaagagtttgaggatgtctttctagaggaactacgacccttgagaggcatagaacatgctgtagaccttgtacctggcgcccctttgcctaacaagcctgcttataagtgtgatccagtggcatctagggaattgcaacgccaaattgaggacctaattgaaaagggctatttaagggagatcatgagtccatgtgttgtgccagctttactagttcctaagaaagatgacacatggaggatgtgcatagatagtagagcagtgaacaacattacagtcaagtaaaggtttcctatgcctagattggaagatatgttggataagttacatggggcatcaatcttttctaagattgatcttcgaagtggctaccaccaaatgaggatcagagaaggtgatgagtggaaaacaacattcaagaccaagcagggattgtatgagtggatggtgatgccatttgccttatgcaatgcgccaagctctttcatgagcttgatgaatgaggtacttcgtccgttccttaacaagtttgtggttgtttacatagatgatatacatatctatagccaaaatgtggaggaacacttgttgaacttgcgtagcttattcatgaagcttagagagcaccaactctatggtaagattgatggcgacgaggttgacgggggattatggcggcagtgaatcaccctctttgccggtcactgaaatacaacctgaggtatctttaaattctgtaattggattgactaacccaaaaactatgaaattgctgggaaaaattgctggatgtgaagttgtggtgatgattgaccctggggcaacccataattttttatcactagctactgttgagaaattagctattcctgtgtcggaatcggaaggatttggggtttctctaggggatggacaggcggtgaggggtagtggaatttgtagaggggtgttattgagtttaaatggtggagttgaagtggaaacagattttcagcctctgggtcttggtaattcggacgtgattttgggtgtacagtggctggagacgttggggacagtggagagcaattggaaaacacaaacaatggggtttgaaatcgagggtgtcaagttcactttgaaggtgacccatcactggcgaggtctcgaatctcactcaaagccatgatacgtaccttatgtaaagagggtggaggtttgtggcttgagttgaaccagattgagcattatcaggagaaaacaccgcattcatcagccttacctgaaattccagttttcttacagagagtccttacccaatttcagtctgtgtttgctacaccagaaggcttaccaccgataagagaacatgaacatgcaatagttcttagagaagggtgtaatccggtaggggtaataccgtaccgttatccacagttccaaaaagatgagatagagcgcctcatcaaagaaatgttggcttccggaatcatcaatccttccacgagccctttctcgagcccggtgatattagtgaagaagaaagatgggtcgtggcggttttgtgtagactatcgggccctcaataaagaaacggtccccgataagtatcccattcccgtgattgatgaattgttggatgagcttcatggggcaacacttttttcaaaactcgacttaagggccgggtatcaccagatccgggttaaggccgaagacactctcaaaacagcttttcgcactcatgaggggcattacgagtttttagtaatgccatttgggttgacaaacgcgccggcaacgtttcaatcccttatgaacgaggtcttcaaaccattcttgcgcaagtttgtcttggtatttttcgacgatatattggtctacagtagttctgccaggaacatgaggagcatttgaccttggtgttgcacaccctagcagctcataaattgtttgtgaatcagaagaaatgtgattttggcaggtcggaagtagcatatatggggcatatcatctctggtcaaggggtggctgtggatatggagaaggttcaagcgatggtggaatggccccttcctaaaaacctccgggaattacggggatttttgggccttacagggtactaccgcaaattcgtacttcactatgctcatatagccaagcctttaactgatcaactcaagagagatgcgtttgggtggtctgaggcagcaactcaagcctttgaaaagctcaagaaggcgatgatcacatcccctgttttggcaatgccggacttccaagagttgtttgtggttgagaccgacgcatccgggtatggtctgggggcagtgttaatgcaaaacaaccgacccattgccttttacagtaagttgttaggtgcccgggctcaattaaagtcgatctacgaaatggagttgatggccatctgcatggcagttcagaattggagatattatctgctgggtcgacatttcctcattcgtacagaccaacagagtttacgtcatctcactcagcagcgagaagtaagtactgccttccaacgttggatgagtaaacttatggggttcgattttgaaatacagtttaagccggggtgtgccaaccgggtagctgatgcattatcccgcaagacagtgggagaggttgaattgggtgcgctgatattaactcatggggtggactggaccgacttggagcgtgaaattgaaggcgatcctctgttgtgcaaaattaaacaagacttccacgggggtgctattactcctgtgcacttttctttggtggacaacaagctgttgttcaagggtcgatacgtgattcccagctcttcggtttttattcctaccttgctgcgagaatatcacgattctcccattggagggcattcgggggacctcaaaacatatctcaggatggctgccgactggtattggaggggcatgcgcaaggatgtggcgcggtatgtgcaacattgtagcgtgtgtcaacaacaaaaaatgtctcaacagatgccagggggggtactacaaccactccccataccttcctcggtttgggatgacttgtcaatggacttcgtggaaggcttgccatcttccaagggggtaaacaccatcctcgtggtggtcgatcgtttgtctaagtacgcccacttcctcccactacgtcatccatttactgctgtgtcggtggcaaatgtgtttgtcaaagaggtggttcgtttgcatgggtttccttcctccattgtttcagatcgggatcgaatttttatgagtgtgttttggcgggaattatttcgtttacatgacaccacactcaaacgaagtaccgcgtatcatcctcaaacggatggtcagtccgaaatcgtcaatcgagctctggagacttatttgcgttgctttgtgggggaatacccgcgctcttgggctcagtggcttgggccgaattttcatataatacttctcctcatctctctaccaaaatgaccccgtcaaggtcctttatggtagagaccctcctactgtgatacgggttaatcggggagcctcacctgttgaaagcttggaaaacatgctccaagagcgagacgcagtattagatgccttgcagattaatctgattaaagctcaacagaaaatgaagagtagtgctgatgctacaagaagagaggtgcattttaaggtgggagatcgagtgtacttaaaattacagccttaccgtcagaaatctttggcttaacgcccttatgagaagttagccgcccgtttctacggaccatttactattttacagaagattgggcaagctgcatacaagttacaacttcctgtttctagcaaggtgcatccggtgtttcatgtctcccaactgaaacaggccgttggttccattcccgtttcagccactattccagagcaattgtcttctgacttggagttagaggtggaacctgatgaactcctcgatgttcgtagtgtttctagaggccagcacacttacttggaagctctcattcagtggcagggattaccatcattcgaagctacctgggaagatgtggctgctttccatcaccattttccatccttccaccttgaggacaaggtgaaactttgggggggtggtaatgtgatgcaccaaactaccactccactactcacctattagaggcgtaagaaaaagggggtaaatcaggaatagtttacaaattctgttgaaaggaatattttgtaattatgatgtcagaggttgttagcaaaaaggcagtagagtaacaataaaaaggggaagggaggagagaagaaggtattgagatttttgtaaggaacttggcccttgggagagttgggagcctctcgaaagctcaccattatcttgtgaatattttccttcctggttatatacaagaaccttcctctgtcaatttcttttctctctaatcttatttcttattctgttttctggttgccattgtttgaagttgcttgttgtgcttgagtaaatacgtgaagtggtgaaacccatctgaattcatcacatctattccaagtggtataatacaagcttgtaatccaaatctaatgagaaatctaagttatgaagaatttcaaaagaactaagtacccttgttttggatgcccaaggatttacttgccgctcaagttaatgctcaacgtgcaagatacaacctctttagtatcccaaggtagtttccataagaattaattgagctcaaatcaagaacaatatttttatgtattaatgtgaacacttcctgaattatattagatatatggtctgaaggttggaagaaagattagcttttaattttaagtttgagatagtttttagaatcgaggaaagattagctcttaacttgtaaactaaggattgctttataagtaaaacattagttatggaactcttaaaattggttttgaacatttctagttaaaaatcccatgtaattctcccaaactagcttaaaatctcacatttcacaagctaaggagagacaaatggcgttctcttgtgaaacaatctaaaattttcattaggctactgttttcaagtatttatatgttagaagtgccgcatataggtacataaaataagtttacaaacacaagtaggaataaggaaaactaaaagagaaacttcagccatacaaaaccggctgaaatcagctactactttctactttctagcttcaaaatctgattgcaagtctcctttaagccaatcaccaatgaaaacctttcctccacatgaagtgtgctcaaatcaagagaagaaacccatcattcgcctatagctacctgggtcagatgaagatacggcaaaaaaaacgctggaaatcagtgaaccaaaataagcaccaattggatgctttctgtccttgctacattttcttctcataggactacttcaagccatacatgaataagcagttagatccagctcctagcatccatttgatcgtacaaatgagctccaaaaagataagtaaaaccaagcagccaaaacctaattaatactaatgatgaattagttgaatagctaatgacgatgaagcaacactttagtaggaatagtgttaattatgatcaatgctacttaatcttctgattaatttttggaaaaatgtcatatctaccttctgtatacacttattcataactatatcgtattattattatttttaaataactaccttttaagtaccaaaacctaagaaatcaggcacttgatggattccatccaaagatccatttggcggggcccactaactgacttttgattttttgcctttcctcttttggttaatctcaatggttcatcaataacaactcaatcttctccccatttcatcaaatcatccctaaatcagaactttttcaaattcacccaaatgaggttatggaaacctctaccaagtttattcgaccacttttagtctagctcaaagttttacacttgcttcaaaaactaagatttattaactttagaaattaggtttttatttttattttttatttaactttgtaacaatcttaaataactcaggtgctttctagagtttggctttaattgtttttcccttggttatgtgaaagaagtatgactactttctccaagactaaagtagagagcaaaaaatgcaattctggaatttcttgcaaaagaaaaggaacgagttaatgataatgaaaaacaaagaaaatgatgagaagagaggagctgaatcaatcatgatcatgtattttaaagttttttttgctattgaagtgacttaagaagaggaaagaggatgagtgaagacaaacaaaagaaaggataaatagagggaaatcttgggcttagaaaggtgaaaaggtaagaagatgagttagtgggccccaacaaatgtatctttggatataatccgtcatgccactgtttggggcttgcttaagtccatacattacttcactaattttacaaaatttattttcttgaccaagaactgaaaaaaccttcagtggtgatctattaggttttggaagttaaaaggtagttatttaaatgtttttaatataaaaggtagttatttagatatttttaatataaaaggtagttatgtgaataaaagtgtatataaaatgtaattttttgacatttttgccttagtttttcttgctaattcaccttttcaacttgaccaagttgctatgaggagaaaacgagcaattattaagcaaatcgcaacactagcattaatccatggcccatgaaactctccataattagagattggattagcacttagtagaacttcttgctcctgctccaggtttccattacttctttatctaagtgcatcaaaaggttgttgggttatgaaaggtggtggttgtgtatagtcattgtcaaaatgttgttaatgcactctatttagaggatgagggattgaatagttttcacctcgtgacctttcattcctttttaaaaaaattgataatgtgtattggtcctatgactgtatgaatggtaataagctatctcatgagctgttactatcttcctcagagtctaggtagaagggtttgggctgataattttctactatgtgcaattagtttgttggatttggatatgctagttgatataggtcctttcccttgggccttctcttaatataggcctacagtgtgattgaagataaatcttctggagaatataagaacaatgagatggattggttagaggttgatttgttcttttggtgtaagactatttcgggttctctattggttatgttcagacgccagaatatgtgttggtgattgttttccatgaacatactttatccgcagagacatttttcttttttcttcctataagattatatttgtttcctctcttggtgctcatctcagtgtctctactttacgttaaactgttgacattacttgacaatgcgtatatttgtcgcatggtgctcttccctcactccacgtcgaccccatacatcaaaaaatgccattaaagaatattcgaactcacaaccttgtgttgaaagaatggaatccctaccaatgactcattaattcattttctctttaagaaataaatgatttcctcacaaacttttaggctttaagagcccaaaagataaaaacataaaataagatagacatcaacgtcaagattagccttaaatgcacaaagcacatgtcaaatgattgataactactcacgagttgcaactctttgggcgttgcctaatattaattggatctcttttaaaaattgttggtggttatggttggtggagaggaccatgtaacttttagctggtcacaactggtaatgattgtcacttttactgcccataaaaaaatttaaactgttgaatatgtttctggcagtggatctgacaaatcctttacaagttggcgtccattttgttttgccatgtgactcaattataatacgtgagttttattatccaccaggtttggctcactaatttccggattaattcaatctaaactgtctccaaagaaggaaaagggtggaggaggaaagccttcttctaatgaaaagacacgcatacgtggttcgttttctttccagggtggaatgcaggtattagcatgtagctttcattctgttaacatttgtggttcttccagacatacatccaatgctttttttttttcttgctataaccataaacattcttgtcatgaacattctttaatactgttgctgagcttagtgtattcgttcattcatgtaatttcctctcttgaggttaaaatggcatacagccttacaacctatatccataatgctccttagagtagaatccctaggttataacatagtaccacttatcaaaataaacatggcacacactgcaggacaagaagtaaatccacctagagaactgagcacctagtagtaaaagcagcgatacattactaataacagtagcagggccataagagtagtaaatgggcctcatttcaacactccccccgtaatggtgagagagaagaagcagtctgaactcccagcttggagagcaaaatagagtgttgctgaacagggagaaccttagtgaaaacatctggcacttgatcttgagatggaacataggtaggctgaataaccccttcttcatttgtattgtccctcaggaaatgacaatctatgtctacatgcttggttttctcatgatgaactagatatgctgctatggcaagagcagcttggttatcacagtagataggagtagcactggactttttaatgcgaagatctttgaggagttgtttgatccacatcacctcacacacagcaagagccatggatctgtactctgcactgaccacaagaaattgcctctttgactttcaagatacggggggagtcaccaaggagcacacaaaaccagatgtagaatttacaacacccatcccattcactatcacaaaatgctgttagttgagcactagacttgttcgccatgagaattcaccctgttggcagcttgaagatgcacattagtggggcagtgcataaatttgcttaaatcatgtatagtgaaggcaatatcaggcattgccttgtaatagtgagataaatgagcttccccatcaatttttgatacacatcaggttgttgaagaggatcaccattgtcagcatagagcttgacatgtgagtccatacgaagcctcaatcgtctgcaatttataaaaccatattcatcaacaagacccatcacatacttctttagagataaaaacgatacttcactacactgatccacttcaatcctcaaaaaatatcttaggccacccatatctttcatgtgaaattggccagcgaagaaactctttgcttcctcaatagttgctaaactattgccagcaagaatgaggtcgtccacatacaccaatatagcactgaaacagtgagagttttgcttgaagaatagagagtagtcacacttggattaagtgaatacattttgctttaaagcagtgttagcttggcaaaccattgcctcaaagcctacttcaagccataaagtgacttaagcagcttgcacaccttagttcatttggtgtcacttctgccatcagtacttagctccccctctccttgaactttgatcctgttacatgtttcactatatcctggtgatagcttcatgtatacactatcctacaattcaccatgcaaaaaagcatttttaacatccatttgtttgcaagaaccaaccctctaaggatgcaacaacaagcatgtggtcatctttgctacaggggtaaaagtctgctcataatctattccatatctctgtctgtcacccatgattacaagccttggcttatgcctattatttgtgccatcagtgctgtattttgttctgatccatccatgtgagggatggctcatttctacaaaatcctagttccgttaggatttgtgttgttttcctaattctagtaggaataggactcctaaaatcctaatcctcctagttctgttaggagtttaaaagttttagtttgattgtaattctagttgtgttagaaatccaaatcctagattcatgtcacgtatggttagaacatggctagtaggataatttgtcttgtgatgtccatagccttggcatttgtggcacctaactttcaatagcttgtcttctgtctccttttctttctccttctttgaggaatcaacgtttttagagctatctaaaccactagcatcaatattaggtttaaaagtgctaaaagatttcgaatagttcttacttgcatacaatttctttttctagtttatgtagcgtcaccagggaacaaaaactcggccgttccgttctggaacggccgctttgtaacggatttcagagaggccgttccgttaaataccgttctagaacggtgatttggaattcacaccaaactcggcgcgatagcgttacgtaacggtgtaacggcgttccagaaccgttacaatcacataacgtccgttatttgaagaagaccagttcttttggtggaggaagaagaagagccaacgcaagatctatagatctgagttaaaatttgaaaataaaacatgtttttttatttaaattaaagcttacagaggatgtagaactcaaattcgagtaaacccctcctttaatttcattaggttactgcaaatcgaaccctaaattgcaaaccctaatttcgaaaaaaccctaatatgcattgggatgcaacgctgcttctccggtcatggcagagaaggtcgacgagtcatcttcggctgcttttagcactgtagctgccggtggttggcttgtttgcaggttagtgcttgctggttttctttctctcataccgatcatcttcttcttttctctcttctctttttcttttttattgtgtgactgccagtcacgtgataattgcaactcataaagtatctctttctctctcttcttttcatccctttttatttttctttcccttttagtttttattccctcacgtggaatcacctaattttcatccttttttatttttttagttacactcttacacagaagtatgttcaaatatcattatagtacctcaaatattgtatttataagagttttggacataatatgatatagaaagtaaaatagaagaaaaataaagtttaaatgtcacttgtgtgatttttttaaaaaaattcacgccgcgacggccgcgaaacgttctatttcccgttacaagccgttcccgcgataacgcgaccgttcccgcgaacgcgaccgcgaccgcgttttttttccttgagcgtcacatcttgcaagcttcttcaaaggtgagttatgtgtacaactccaatttctctccaatcccctccgtcctcatttaggcctccaaggaagctacttaaacattgatcttcaagttcatcaattttccaaagaatggataacttctcgaactcctttatgtaatcttcaacggacatattcccttgtttaagagtagaccattccatgtacaagctttgtttgtagttagaaggaacaaaacgtcctcttaacaactttttaagcttatcccaagtagagattttgggtttattagctttcacacgctgcctctttactccatccaaccaaatagatgcatatttggttaccttaagcacggccaccttgtatttcttttcttttggtgtctcttaatcccaagtagagcttttgcgtgtgaaagctaataaacacaaaatctctacttgggataatcttcttcttgtttccgaaacaactaattcttatggtagttaggaaagcaagaatggtttctaattcaatagggaatatattaattattattagtttaagttaaatagtgcacgaatctaaatagattattcgtctcaaaatctcacttaagtatagatttgtttggacatctgagggaagaagaagagagcgagataaaggagaattatcactcaatgaatccatatcccgagttttcccatttacttctttgaaagcaatatagttcacgaggtcttattatcagtctatggacataagagtaataatttaagggcaaaaactatgactttatgggtttaaactgatacatgttctgttaaactgatagatgttctgtgttaaaccgatactcatatattcctggttaaactgatagatatatgatttaaattgatacccgtctcagtcatgtcttggattgagacggtctgacacaagactttttgtgtattatatatctgattagaataaatttatcctgtttactaattattttatcttctccagacacttgttgacacaatatgcaatcagtttggtaaagatgaactcaaactacagtgcaaggtcctttcattgtcctacagtcataaggggatcccttcttcagaaaattgggtcgtgtcttctgtgtcaaaaaattccattgaagatcaacaatatgatgctgtcatcgttaccgtgagttttactttgcttactgctattgcaccaatctttcttcttttgacacactgataatggcaatgctgttgtggtttgaagccatgttatggggttttagggatatttatggagtctgatctaatatgttattggataaaattcagatctgtaacgtgactcaatgagattgaaaaaaattgaatcaagataatggattggaaaattaggagctaacctagggtctataagcgatccacttggagtctcataccaagcaggtattcgacattttaggtttatattgctgctatggctcatatgggagcctacatagggtctggtgcttattcctttttcttttgtctagttttggggctgcacatttctgttgtgttttgatatggatagccatcacctgcaattgcatggaggctgaactaagttctataggggagcaaacagtatctgttggaaatttattttcatattgtgtttttaaatgctataatccaaaatttgttgttcccctaaaatgcctaaaatacccttatgtaactgctccatctgtcccttaatagacttcccatttctccaatgcatgtttgccaatacacattttgtattgttaatatcaaaaattacatattagtaaaaattataaaagtttgattttcctaatgtacgcaatgagacgaatcaaacaagacgccatatgactatgttttttcttatacttcctatgttttttaataagtgacatgttttccttttagggaaatgtcacaataagtgacacatagctcaaagtagtaaaaatacttctcatttattacatctttgccattatttaattgtttcacctacctactttatccaatactcaaatttgattggttgaacaattggtcccaactttctctagactccttggtattccctttcccccactttctctctgtgtcacttattaaaaaatggaggacgtatattggaaaaaaattggaaggttttcttcacttatgaatagtggtaaaattagagatgggaaggctattttgggatggatggagtaatatttaaatttttaaaataatgtcattgttttagtgatgaaataaaattcaaggctattttttctagtaattatgttatctgtacatcaccacacgtatcgcgtgcatataagactagtttgatgatattccaacactgttcgaaggaagtcaggcatggaaccatgtttgcttccatatgggaaatattttgcttactctccttcaaacatctacctcattatcccagaatgattgatcgaatctaatacaaatatacaattgatcatatgccaccagggaattacatcaaattaaatttttatagaaggggaatcagtcatagcctcatagggaacgaataagtgatactcgccagtttctttcctggttacttttcctcttctcactagccatcctttatgtatgggtatgctgcatcattcctgccactggttgggactcccgtttgaactatggggggatgggaaagctaagccatcatcttcaaattgagtttcttgagaatgtaagacaccatctgtaagatgaatatagtgcactctatagtcaatgtcatgatctttatgggtttatctgctgaaataactgtgatatacccagctctccatttacaaagttttcctacatattaaactcttgcccgcaattctagaacttcattgtagaacttttcctacataagcatcatttgtcttttctgtagtaaaagttagaaagagctttattttagaacattcgtttttagttttctttgttgttgattactccgccacttttaatacttttatgattcaagtatttgacaaaatcatgtaatttaggtcctctgctgcatgcagtctataccctctctctctctctctctctctctctctctgtggttgtgtcttacttgttgagttactaactccagccattacataaagtaggctggcattatgatgagcaaattactcaagaccacatgttagctcctttttcttttctccttattctgaaaggcaaatataggtccatcttggtgcttctcatgtcataagtaagctgaccccctccttttccagggaataggacaataatccaaaagtgagggttttacatgttgggatttgtgaagtttcttattttacttaatagccgagtcagtgttacaatacatagtaccgtgttacaaaatagtatgtaacaccaagcatgtttatgtgcaaaattgtgcaagactttgttgctggcacgccaagggctgttttaatgtagtttacttattcttttaggtttttcagatgacaatcataaagggaattaggagtgtttttattgtagtcaatccctattgtgctacaacgataaaagaaaaaagcacaagactagaaggagaagtaatgtctaggaaagactcctcacctggggttgctagtcacctacacatcttagaaggcatcaaaccaaagcttattcccctcgactgttttcgggagaaaagaagacaaaattgtttctaacttatactttaccagtttcactacagcatcagaaagaagcaaaatatgctcccacaacacggcgaacctagctttccagatgtgataaaccagaccagcaaaatgattattttcactagagctttgagtctattttttcggtttttccccttcttcctggtaatgtcacgccaccaagccatcatctcaattttttgagatttgacgtaatcgctcaaatagctgagtaagacacttcttgctctaaatactaataaaaaagaggtgaatgtgggtctcagccatgttactcaaatcggataaagtgtctactcttattagggtttttgggtgttggactcatccatttttttttgtaaaatgtcaagattttggtttgaaatgagagattcaagtgtcgtgacatgagtcggcacgcaacacttaaacgtgtcgaagtaacagagggtctcagacaatcaactttaatcaatcacgaaccccaaaatttatgcaacctttgctcatattcagtctctgtaaagcactcaactgcagcacacccacccattcgcttcacctacagcaggagggcacccaagtaattgctatgatgagcgaattattctgttttgccttgctggaatattgctgttagatttgctgactcactggcagttaattatagtcagagaatgagaaatatcctgtagagagagaaagggtatcttttgtatttagctctataaatagctaaggaagggaagggcattgagagtttatgatattataataggagagatttagcctctcgaatgctgataggagcgtagctcttgttggattatcaatactactctgtttgctctatctatttctactcaggttccttcttgtacagtggatccctgattggatttacttcatcaaccagcagataaaattatttgtaggcacattgaaaccattccaaacctaatgaggccaaagtttatcacaaagaatataggagccaaatgtaggcaacagataagagtataattgccagaagttgaagactccaggtattgttcagaaaccttaatgcatatcatcattctgacactagattttccccggagccaactaacaaaaatgaattaaagagattaaggctatgtttagttcacctgaaattttctgatctgaacttatctgatctgatctgaacttattttttctgatctgatctgatctgatctgaaccaatctgattacaagatcttatcttttagatttttctcaatatataagaaaaaatatagtcatgtggggtcttgtttgattcgtctcaatgagtactttattaatattcaattattataatttttactaatatgtaatgaaagatataatgatttttaaatataagcatgatctgaactgatctgatgtgaacttattttttctgatctgatctgatctgattagatctgaaataagcaaaaataaggtgaactgaacatagcctaagcaacaattgagggaaaataagatcattatggctaagataagataaatatgtaatgataaaatcagagtaattatatcagttacactctcaacattcgtcagattgaggtttcctcccaaaatgccaacccacttttctgtattttcacgtccttctctctacccttctaggtatatattacatcagctgtaaaatttttgaaccaactagtagaatactgatctaccctcaactgcctcactttctcattttttctgggcctttttctctctagcacaagtccacataagtgatgcatagcagaaatataattccactagtcatcctcaatattgatataacaaacacatcacccacatattatcatttttaatcgctgcatgcgaggcatacttacccaccaatcaggatatgcataacagcgttcctaattccaaaaccaccatatatcttgggtttgcaactctcatccctagcaacaaggggactttctgaaaaagtggcagattccgcccacaagtagtttgtacggacacctttattatattattaatatcatatttcggcaacacaaattaccagcccagtaaaacatgaattgacatgagactaacaaggggcccaatctaatatcgtacgtctgtactaagcaatgtataaaaaaaagctcaaggtgcattgatgcaatagggatcctaatgtgcataggtgcgcctcattgaagtgaggcaccactaaggataaataaaaaagattgatgtaaaattaaattgtgcaccttgggtgcgcctcgatgaactttttttgtgtgcctaagtgtacctcaagtacgcctcattgatatcgcctcgcctggcagaaaacgagcttgaccccaatcgccttgctccccaccgcctaggcgtgcctcagtcacactttttaaatacattggtattaagtactcagaatggcaaaaagaaactttgggcattaattagacatttcactttttgtgcaactatttgtgacttcagagattgatatgttttctacattacagacttttgtgatggctgcatggtctccactgtcaaagaacattagtttaagtagaagaaatattgctctattaccttcctccctctacaaacaaaatcctaaaatgtggttatgtagtgccaattcaaacttgtagatgcatgactaatgctttcattatgctgtgggtttttatactatgattcatgtccaattacataacaattagctggagtcaggatatgtcacggaaattttaagcctggcaggatgattgtttatattttctctttttcggtgtttaagtcaaagtaaacttctaggctgctcttttataggctagttgggctgttggggagatctacacattaagtgtgaagaaatcttgtctaactccagtttggttgagaactgtaagctgtcataacatttgttgcatgatgaggccttgtgggattatcatgttagctgtaaactctaaacttacttgaaatctagtgttgtgtctccttatttctgtagtcaaaattgaaccttctgtacgtttttgatacctgcgactagaatgatggaattctgaattactgatactattacaaccatctgctaagaacgaagatgactcttagctaatttctcagcagatttagagaaattaagaagaattactaatgaatatttaaagagaaaactaccaagatatgattgtattgatgaaaaacaccaattacaacctaaccaacattcgagaggttggagctctcccaagtaaccatttctctcactaaacttatcaattttcaagatgccttttccattctcagttcctctatatttatactactccccttagcaaactacccaacttattccccaagtaaactaaagagataatatctaaaatacccttccccctacaataatattagttcttagcattaccggccccctaaacttccaccttgtcctcaaggtgggtcgtaatcatcactaaattctgggcctctactcgtatattcagtgtcttgcagcccttcaggccccaagcctaggttatgcagctcgtgttgcggctcctcctcatatagttctctggctggagtgagtgcctcaactataatgaaaaagtcctggaggtggggaaggaaggagtgtctgaaatggtgtggtgtgctgctggtgttatgggcttgtgcctgaaagttttgggtttaaagagatggagtggagaagagtggagaagtgactggagacgtaaaagaaggaatcataatttttgtaagtggtgggttgaaaaagttggtgggaagaattgtttttataaaatgtagtgtaatggtcgaaaaatgggtggagtaagtatggtttttggctggggatgtggtactgggttgaaaataaataggtctgagcttacttgtaaaattggcctcaacatgagcaggcccaatatcttgagccaattccccaaaagctggcaatagagcactcttaattgcattgttgtgggccatcgggctccaaacatatattcggaggagccggacttctttggtgatgtcattagcttggcccattgcacactttcccttaacagcctcaagatcttttcccacttttgtaccccaaccacgtggcttcaccatcctttctttcttgcttttgtcacttttttggcaatatacgagtttgtccttactaccctcatcttctaatgttggcttcctcaccaagcttaatttctggaattttgtccaccaaatcccaccacccatcgtcaacaccatacctatctacaccggccaagaagcctggtcctccacccgaattttcgccacagacaaagcctgaacaaccgtcagttctctcaccggagaagttcacaggtccaccacctgacccactagttgctgatccacccttcacaaatctccctcctctggctgccacaagtagtggttcctccgtaatactcatatttctcgtccaagagccctggaccaccaccggacccacttccaccggcaccaacttgttcaaatgatacttctctttcttttccaaacagcctacttggactggaaaaaccactgcgattgtagcctccgccagatctgtagcctagtgcacctaacgtgcttccaactgcaacccaatagggatggaaatggatgggattcggggagggtggagcatcacccgcatccgtcacccgcatccattcgctccacccgctccacccgcatccatccatccgtcacccacgggtgaaacgggtgggtcggtgataaacgggtggaaccatttagggggtgtttggtatcatgtttttttacaaaagaaacagaatcaagtaacaaaatccgtttctacttgtttggttctatgttgctcagactcgagtacccatgtccgacacgggtacgtgtccaagtgtccaactcagctattttctagaattttttatattttttaacccaaaacaaagtgtccaagtgtcccacccatgtccgactcccgaggatccgacacgggtacttgaggtgaaatgaagagtccgagcaacggaggtttggttagtgtgtaaagtaacaattaccgttacttgaggaaaacacatccccccaagttgtttccattcaaaaacctaaggaaacaaataacgtttcactcctcaaacaagaggaaagggaatgggttatatttatttccattccattaggataccaaacaactaataagggtaacacttattattatcctttcccctccttatcaaaatcctttccattccgtttacggtattcataccaaacacccccttagtatattttctaatgaaatttgtgatatgatatgcatgatataaaataattctatcaaaaatataaaaagtaagtaaacttacatgtacaacttaatagatgggtgatgggttggaggttaaacgagtgatggatcgggtgacgggtgaagaaattctcacccaccactcgctttccatccatttaaattaggtttttcatccatttaaaaaaccgggttaaacaggtgatgtatgatccatcacccatttccatcctcaaacacatcccgatttgtttactgcaccaccagatccaccagtataaccacccgaaaaatcatcatgccttctactagccttgtaacctgctcccggtgagaagcttcttccacaagtggtggtcgctggacctccatctccttcttccccaaaaaattttccatgacacccactcgacccttcatctgtgacaacctcttcttcgtccacctctgaagttttggggtcgtcttcctcctcaagctcctcttgaagtaactttaacttccgttggatgggagagaacgcttcattgattatcttcaccagatcttcttgaagtttctcgaaactttttctcacgttttcctctacctctttcgtgatttcctttccgatctccttcatttttagactaggagctcttgcgattccatggcagatttctttttttaaaacaagaaaatcaggcacttaatctcccagaatagtggtgctctgataccattttctaagaaccaagatgactcttagctaatttctcagcataacaacaaatttagagaaattaagaagaattactaatgaatatttaaagagaaaactactaagatatgattgtattgatgaaaaacaccgattacaacctaaccaagaggttggagctctcccaagtaaccatttctctcactaaacttatcaattttcaagatgccgtttactactccccttagcaaactacccaacttattccccaataaactaaagagataatatctaaaatacccttccccctacaatattagttcttagcaccatcaaactgggatggatggttttgtaaggttccaatttacttctccatcaaaatattttaggattttttatctcatgtattttagagtttcctcgtccctttttatctgataagattcttctgatgatttgattttatggtaggctccaatcagcaatattaaagaactgaagattctgaaagctggagttccattttcacttgacttcattccagaggtttgtatttttatagtggttagacatgcttcccctagttttcaaagtaaaagcatccttgttgtgacgatattttttcccttgtttttgtttttattattatcatcacttatttccattttctattttccatgctgataagatgttcatcaccataatcttgtggtatcagaagtgtttagtggagtttattcactacacatgcagttgttcttttgccatgaccgccattcattttctcgtcaaaacaaatctatgaagtttggttttcagactcatggttcttgtagctcttgtgaatttttttttcttctccttgcatgcattcttcaaattacatattgcatataccaggtgctctcctttattttatatttaatttttaaaattctatcatatattttttaatgtcaaacctcaaactaggggttcactgcatcttaggcttaccaggctaatatttctttacttaaccttttccctttatatttgctatcctcttgtgtagtaatcaccataagaagggtacaaactaaattaccctcccattcttttgtatcattctgaaatagtgtcacagagctttgatttttttgccctcatttaatctggcaaatgttctctctatttttttttttttactttcttttgacgggattctcaggcaattgttacggggagcagccagtcacactgtttctgtttattatgcaggtgagttacctgcccctctctgttatgattactgcgtttaagaagaccagcgttacaagacctcttgagggcttcggagttcttatcccttcgaatgagcaacataatggactgaagactgarggtaattgtctggttcacgtgtgtagcgaatcagattttcaaaccctgatttcgtaacattgcaggtactctgttttcatctatgatgtttccagatcgtgctttctccgatatgtatctctatactaccgtngttggaggaagcagaaatagagaacttgcaaaagcttcaacgtatgagatatgcaatgttttaaatgtatgctatagtcatcgtttcaaccttttggtgcctttttcttactaatttatcctcctggtttaatgatcttagggatgaattggagcaaatagtttcgtctgatctccaccagctgttgggcactgagggaaaacctacttttgtgaagtattgatatctttcacccaacttaacatgatttgtgcttataatatgttaaataaagtaactgaaatcctgaaattaagactacgaaactgtatggtgacagtcatttttactggaacaatgcattccctttatatgggcacaattacgactcagttctgagagcaatagaaaagatggaaagagatcttcctggacttttttacgcaggtaatctgtcatttgcttgttgcgataaagttcatgtacagttggcatatcaatcaacttgcattctttcttgctaactccaaacaatcaggatcattaacttgtaggctgcagcaacagagagtatctcccaagttgttaggtttcatgtaacctcgtcgctgagatgaaatttccgttggctaaaaagtgaaagttttgtattgatgttacccaaaacaaaagtattttgcatgttgcttgaagttttggttgtttcagatagtacatcctttgacatgaaaataaatggaaaagcgtatgtcaagcaattatcatctagtttctttgtttctagatactagccgcatttgatcccagatcatttttgaggaagtcagctgaaataccgtagctatccttcagttttcataataaaactttaatggatctgatgtacagtaatttagtgtgcaccgggttaataattgatattaacttcatatagtgagtcttataaagatataatgaacttatatacaatatagtggattttattaatggaaaacatatagtgaaactatatgcaatatagtatgatacataaagacttagacaacaagagcattcgaaattacaaagaacaaaggaaagaacaattgtatcaaaccggttcgaatgaacaaacaaccaccacttccacaatcaatgtaccaccaatcaagactaaactataacaatgagcttctagtttaagtctactttgagttttaatcaccaattcaacgattagatgatcaaaattgcaaaggttaagagttggtcaaacctaaccaagagttacactaggcacatagctttgttaggagtatattagtttatgaattctagttaagttagaaatccaatacctagttggattaggattcctaattggattagaattatagtttagttagaattctagtaatagtaggcgtgtgattaggagatataattagcttaattcttatattgttagtttaattcttatcctcgttttaggtttatctttagtcgaacttgtaccctatataaggggcctttatttcattaataatatagtttattttgagtttaaacctttacttgtgattgtttgcttgagaggttattaatcgaaccattaataacttttcaggattgttaagtttttagtgttaaacatcttaatttcaggagtgattttaagagtgtttagattcttgtattcaagtttcaggactgatcttgaatcaagaaatatccctagtttcgactaatatcataagtagttcgaattcttggagtcttttcttcaagattcatattcataacttgattatttagacttcttggttttgtaatcatatcaagtggtatcagttttccagggaggagaggatacaaagggttctctttgatcaaagaagatccaagggcatcaataagaatgacacttgcaataagttcgagtgatacaaacaacttcaagactcgatcttttgctaccaagaaccaatcttgacgcctgaagattgttaggacaaaggataagaagtgtttctacatccaagattgcattctttacgtccaagattgcgtcaagatccattctttaagttcaagaaaggagtagaaagcattcgaacactacttaaacatgacatccgagatggataagctggctatggccatgagtgccttggcacaatcacaaactgagtcacgcaaccacatgggtaggatggaggcacgtgaccgtggattgaaactagatgactatagtggagatggcaatccagaagacttgttggagtggatttgccaactaggcaaagtgagtgattataggggctttgatcacaagaagagattcaaggttgcttccattaggctcacgaagtatgctggaatacggctcgaaggattgcatgcacaaacttcttgcctaatgactatgaacaaaaacagttcataaggctcgcatcaataagccaaaacacacttagtgtacacgaatacagcatggagtttgacaaattagggcttatatgtgacatagaagagaaagagcaatacaagattgcaatgtacattaaagggttgaatcgatatatagccaagaagatcgaagtctcaacttatcacttctttgaggatgtgactaaattggctaagaaattcgaagagcatgacaaagaagaagggcctaagagttcttacacacctaagtatgactctagtgctaaagggaaatcaacagttccctactcaaggtggtcggaaagacctaagaaccccactacacctaaggaggacactagcatggagaagacaaaagtggccgtacctaaggagagtttaattttgtgttttatacatctttgcttaagagcttaacaattgaaactattaataacttttcaggatggttaagtttttagtgttaaacatcttaatttcaggagtgattttaagagtatttagattcttgtattcaagtttcaggagtgatcttgaatcaagaaatatccccttgttcaactattataattgatcttattcgagttcttggagttaatttcttcaagattcatattcatacttgattattagacttcttggtttagtaatcatatcaatatcattagcattaatttacccccagggagattaagaaaggattagcctaatcaaggcgcttaagaagtttttaggaaaaatcgtgcttgttaagcttaagaattgaacttctttcaccatttgcccttgattctcttgttgaactagaagatcttggttcatagtagatgctcctgcatcatagtagagcatttaattttaattttttaacatgcacgaagatgtaggtagtgtagtatatatcgtgagacgtggtttaacatatagaaagatgtagtttctgcatgatatagtgagtttttgcatgatatagtgaatgtctgaatgatacagtggatcgttccgaattgttgtagtttgtatgatatagtatttttgtgaatgatatagtgagtttcttcatgatacaatgggtttctgaatgatatagtggattgcttagaaatgatatagtgagcttttgtatcatgtagtaggtttctatgtgatataggttgttaaaagatgatacatgcttttggcctcatgtactctaatgttaacgtgaacccggtccttgcaagtcaattgcagttttttcaatattaagctatttttttttttttttttttttttttttttttttttttgtacgggaatatttagcatctttaccacaaacataaccatacgaatattatgcggaaattccagtctgaagtcttaacttttcaaaattaaaagcttctatattatttttggaatgaaaaaaaatgagctatggcatgttattttgaaatacaatgagtctcaaggtgcatagtggcttcaattctacgaataatgaatggactactgatttctaattttttgttccgggcttttgcattaggtaaccataaagatggactctctgtgggaagaactatttcctctggatacaaagctgcggagcttgtgatatcctatctcaactctacttaagatgcctaaatgatcgaggagactccgtaagtcctttctctgattctatctttgaactgagtggaaacacgactgtggtctaaagtagttgatgtctcagatatccagaaatggcgttagtgatattcaggagctgtccattgaccctttgattcattgttgcagtttactgaaagttgttagctggtctcagaaaaacgaaaggaaaaaagggggaaaacaaaaacaaagaaacgtagattgtggtgttaaaatcaagaattccagagatttgtaccttctttatcagttgaattgtttacagtgtgaatcaagaagttagctcgaccttcttttcttgtgaatggtaagatttcgtgatcatcaatacttgattgtgctgtttgcaacttcaacggtaagatttcctgatcttacagtttaattgcttgtgctgtttgccactt

SEQ ID NO: 42 - DNA, 1575 bp, synthetic construct
  misc_feature 1..1575: note = L397E+F420V mutated Beta vulgaris PPO2
  variation 1260: note = n is any nucleotide
  source 1..1575: mol_type = other DNA
atggtaatgctatacgattctcacctctcaggagtctcaactcatcttcaactatcgcaggcatttcccaggaagaacccattaatggccaaagtgtctgagccgggtaaacccacttctgctaaaaggattgctgttgttggtgctggtgttagtggacttgctgccgcatataagctaaagtcccatggcttgagtgtgacattgtttgaagctgatactagagctggaggaaaactcaaaactgttgcaaaggatggtttgatttgggatgagggggcaaatactatgatagagagtgaagcggaggtcacgagtttactcgatgatcttgggcttcgtgagaagcagcagtttccaattgcacaaaacaaaagatacattgcgagagacggtcgtcctgtgctgataccttcgagtcccattgcacttctcaagagcaatatcctttcagcgcaatctaagctacaacttatgttggagccattcctttggagaaaacgctatgcttctaagatttctgatgagcatgctcaggaaagtgtgggtgagttttttgagcgacattttgggaaagagtttgttgattatctaattgatccttttgtcgcgggtacaagtggaggagatcctcagtctctttctatgcgtcatgcatttccagaagtatggaatattgagaacaagtttggctcactaatttccggattaattcaatctaaactgtctccaaagaaggaaaagggtggaggaggaaagccttcttctaatgaaaagacacgcatacgtggttcgttttctttccagggtggaatgcagacacttgttgacacaatatgcaatcagtttggtaaagatgaactcaaactacagtgcaaggtcctttcattgtcctacagtcataaggggatcccttcttcagaaaattgggtcgtgtcttctgtgtcaaaaaattccattgaagatcaacaatatgatgctgtcatcgttaccgctccaatcagcaatattaaagaactgaagattctgaaagctggagttccattttcacttgacttcattccagaggtgagttacctgcccctctctgttatgattactgcgtttaagaagaccagcgttacaagacctcttgagggcttcggagttcttatcccttcgaatgagcaacataatggactgaagactgarggtactctgttttcatctatgatgtttccagatcgtgctttctccgatatgtatctctatactaccgtngttggaggaagcagaaatagagaacttgcaaaagcttcaacggatgaattggagcaaatagtttcgtctgatctccaccagctgttgggcactgagggaaaacctacttttgtgaatcatttttactggaacaatgcattccctttatatgggcacaattacgactcagttctgagagcaatagaaaagatggaaagagatcttcctggacttttttacgcaggtaaccataaagatggactctctgtgggaagaactatttcctctggatacaaagctgcggagcttgtgatatcctatctcaactctacttaa

SEQ ID NO: 43 - protein, 524 aa, synthetic construct
  REGION 1..524: note = L397E+F420V mutant protein of Beta vulgaris PPO2
MVMLYDSHLSGVSTHLQLSQAFPRKNPLMAKVSEPGKPTSAKRIAVVGAGVSGLAAAYKLKSHGLSVTLFEADTRAGGKLKTVAKDGLIWDEGANTMIESEAEVTSLLDDLGLREKQQFPIAQNKRYIARDGRPVLIPSSPIALLKSNILSAQSKLQLMLEPFLWRKRYASKISDEHAQESVGEFFERHFGKEFVDYLIDPFVAGTSGGDPQSLSMRHAFPEVWNIENKFGSLISGLIQSKLSPKKEKGGGGKPSSNEKTRIRGSFSFQGGMQTLVDTICNQFGKDELKLQCKVLSLSYSHKGIPSSENWVVSSVSKNSIEDQQYDAVIVTAPISNIKELKILKAGVPFSLDFIPEVSYLPLSVMITAFKKTSVTRPLEGFGVLIPSNEQHNGLKTEGTLFSSMMFPDRAFSDMYLYTTVVGGSRNRELAKASTDELEQIVSSDLHQLLGTEGKPTFVNHFYWNNAFPLYGHNYDSVLRAIEKMERDLPGLFYAGNHKDGLSVGRTISSGYKAAELVISYLNST

SEQ ID NO: 44 - DNA, 37009 bp, synthetic construct
  misc_feature 1..37009: note = R126L mutated Beta vulgaris PPO2
  source 1..37009: mol_type = other DNA
tattccatcgaatgtagcaaattgactgtccgttgcaatttcggagtttccactcgtcgcatggtaaatggtaatgctatacgattctcacctctcaggagtctcaactcatcttcaactatcgcaggcatttcccaggaagaacccattaatggccaaagtgtctgagccgggtaaacccagtaagtcaaacattcgaatcacaactcaagcaaatttgtcttgtttgcgttatattttgctcatttcagccttttttgtttttccgacctttgcatactgaatattgtgtgtgtgtgtgtgtggggtttcagcttctgctaaaaggattgctgttgttggtgctggtgttaggtaaattttcgtctcttgcagagtttttgagtcatttgggaattctatgtgaaacttgtaactcccttcagtccaacgaacgcagtacaattttctatcaaatcatggtcctaatttccaattttccatatatattgttggaattatattgggattgtctatcactattaatagtattaggatcaattgtagagaagcacagaaatttttgggatcgaaagaatatctggattgccacattaacagcagatataattcttccaattggtttttggttcttcctaccttgacttgtctggtcaaacattataaactttaacctttaatatccattaaagtaaactataggatttttttgtctaaaacatgcttatataacatgaaatttgtgagaaaccaccttatatatatttttttgcgaaaacaaaccttaaacaaaattattatcgtgagaacaaaccttatgccaatttcgatcattgacccaaggttttggcattgaccgtgtcatgaattttgttgggtttaaaaagtcatgtgtcttgcatacgaaatggtaaatgcgggaaccttgggtcaatgtttggaatccgcataaggtttgttctcccaaaaaatgtttttgttcaaggtttgtttttgcaaaaaaacttatataaggtgctttctcagaaatttcatgttttataaagtagtatttgacaaaaaaccctaaaatatattatagaattattattgactaaattgtgtaaaaatgtactcttctaaaagtacattatagtattttagtggaacatttgcgagaaactactttataaatacgatttttgcgagaaatttcctaataaaaaaatgtgaagtgcaaaactatcttattgataattttctactccctcaaatccaaaatactatgaagtctttcctttctggtttgtcccagattagtttgtacgcttccatctttggtatgatcccacttttattatacttattagttttacgtgagttccttactctatctcttttaacaaaaatactcaactatctctatccaataaaaagttccttactagtcctatcacatctgctttttaataaaataacgtttgataaccacacaacttatatccttaaaatacacgttcaaccaagtgttgagattaatttggacggagggaataaatattttttgaggcatattggtagcagtattcggattccgataggttgactatgtttccaatgttgaccaacacttgccttgcatgtaattctaactttgctcttttttattcttcatttccctcgtattccatatacaatgtttagagacccattccttcctcttctcttctttcccttccttactatgctttgccataatcttcctcaaatgagtgcaaattaatttgtcgttgatgtaggccaactgattgtagcacatcttcatagttcatacctcaacacactcgtaattatattataccctacatgttaaatggctcatgaagctttattttatatcatacttcctccgtttcacaataagtgtaacacttttcttatttggaataatcacaataagtgaaaccaagctccaaatggtaagaaaagttcactcttattacaaatataccaccaaaaagtaagaggggatcacaacttcaatacttcttcactctactttattgtggtcccaactttctctctctaaattccttggtaactccccactttctctatgtttcacttatggtgaaatggaggaagtattttgtagtggtatttagctactaggccttggatgatatacaatcatacaatgtatttatattcacgataatttgctgcccaccttgattaccatgatttccaccaattttatcaatttcagtacttcaccaccccgaatttatattttttatttccaaccttggtatctccatttgtctgagtgcccgatccatttgtatcgcctccagaattgaagaagcttcctgcagctagacaattaggaaggttaaaaaagtttggagatggtggaggatagccataataatcattgttgggaggtggaacttggaaggttattgtagggttgaagtccttgatgaagaagaattgagttcaaatgagaggaaaaaggagcagggaagagggacaataagaaaaaaaagggtaaactaaaatcacgtgtaaggcatgtgcagatcaacatcagaaagcatagtcaacctactggtattagggcactgatacctttttgggtcaaaatttttttacaaggtatttcatgaggtagttttgtccatttttttttttacaaggtatcgtctcattttttttttatcatttagtttctcgcaataagtgtatttcatgaggtagttttttccaaaatttcctcatttattataaaatacctcatcttttccataaataatgcaatgtctagacttttacgctgtttacacatgctcctttgaccatctattgacacacaaggaaaaatagagtagagtcatgcaggatcttgttagatttttctcgatatatactttcaaaagatcaatttttttataattttttttttgaggggattttttttttataattatgtacttatcaaaggtcaaagttgtgcaccgggaagcataaaactctatgtgttgcaatttacatggaaggggaggagtataataagagaaaattatggtaaaaggttcattcctggagatcatgagaaaggaagtagaaagaacaaaaaagaacaatgggagtgcttttcaatgtttgttgtacgtagcatttattcatttgctataatgttttgtgacattgtagtggacttgctgccgcatataagctaaagtcccatggcttgagtgtgacattgtttgaagctgatactagagctggaggaaaactcaaaactgttgcaaaggatggtttgatttgggatgagggggcaaatactatggtaatgtttttgattattgcaggtcttgcactttagcgcacaattaatttctggatttttttttgtactgtggtggttatggtcatcaacatgtctcacccactgtgcttgcagatagagagtgaagcggaggtcacgagtttactcgatgatcttgggcttcgtgagaagcagcagtttgtaagtctttcattatctgaatggcacatactttatttcgaaagattgtaattgccttttctttctagatggcttcatcttcatgttgctttctgattcagtttcgtggctaactttccaagtttgtctgattgctaactctgtcatagccaattgcacaaaacaaattrtacattgcgagagacggtcgtcctgtgctggtaagtttgcttgttttacttttgacctcttttaagatctttcaactctggagcctggaaacatggtgatgcaggaggcaagttctctctattttacatcctttcttctctgtatcttatgacatttgcctcttattctgtgcagataccttcgagtcccattgcacttctcaagagcaatatcctttcagcgcaatctaaggtcgttttatgttaagacatacttgatgctgagagtttattgaattcttaaccttcttcttattttttttttatttttttagcaaaaggtaagtatattgcatttaccaaaaaacagtatgtacaccaccacagcagccatgtcagaatctagaaataccaccgaaaaaatcctacacccaaccagagacagttatattatatcctactcctaagtttctgtacccaatttacatcaatattggtccatttacaagatatttttataattcacagaagcacatcagttttaattagtttaataatgacctctggatgaataaccaactcagaccatatagccttattcctggctttccggaagttgtacgccagagcagcaagcacagcaatgcaaacctgtttcttatacctccttttatgtgtcttagcccatctcttatagctagtgaagatacagtcgtgtgcacaggattgaaccccaatccaactagcgaaagcctcacaacattatgactataaatacatctgaagtataaatgctgcacctttttctcctcttgcctgcacggtatcagaacaaatcccagctttagctaacaattccctggttttcagtttattcaatgccatcatgcaagcaatgaaagaatgttttggaacattcagtttgttccaaacacagtgagagcaagggacctttcctgcagttccacttagccacttatatccctgactaatagtatgactctttgcaccgtaaattgatttcaacttaactttttcataagcagtgaattgtgtgttgttagagtgtctagctgtctaggagattgggagaaaaggagggaccaaggagatagaaacacacctttgtgtttctttgtgtatttactttttagggtgggtcacgttttctgagaaatttgggaaaaggaagaaatagtaacacactttcccatttgtataacctgtatactggagctccaatataatttgcatttttttttgagctgcaagaatatgttgacaaacagttattgcttcttcctcagctacaacttatgttggagccattcctttggagaaaacgctatgcttctaagatttctgatgagcatgctcaggaaaggtaatgtcaagacatgtgttacctcgccttaattttcgttccaggaggtgagcatgcatttagaactaaaaggcacaaagactgttggtggtcttgcctgttcaaatataatggagaggagttttcgctacatttaccctctcttgaagtggggttgaaatatagcatcaagttgaatgcttgattaagtttaaaggacttgtgtaactctttttctgtttactgtgattacatgacctggttgattaacataatggtctgtttatctgtagtgtgggtgagttttttgagcgacattttgggaaagaggtaatggtttaccatagtatttctgctttagtggtaaattgtaatgttgctgataattatacttcgctgcagtttgttgattatctaattgatccttttgtcgcgggtacaagtggaggagatcctcagtctctttctgtaagtgaacattttgtgcttcactcccaattttttggaggctggaaatagattcttttccagttgttctgtcaaaaatagatgtagctttattttgaatttgaagttcccaattgttcattttgactattactgattattgctaagagtggcattatgctattatgctcctaaaagaaaggtgaattttgacctacatatagtataatgtatcaatattggtttaattgtttgttcttttgttccttttggtgctcatcttgcgccttgttctcatcgctcgttttttcatgttgcacttgatttaaatttgctcagcttaacttgtctttttgaatttatattacttattgctatattttactaatttcgttgaaactaattttttgctgaacttttcgttttgttgaaatcatttttctgaattaacttgattttcctgaatagaattgaattttggtgatcttaccttttctgcagccttttatttctttcttgtcctttttccaatctcatttttttatatttccattgtgttgacatcttatcattaactgtgcagatgcgtcatgcatttccagaagtatggaatattgagaacaagtatggaccataagacgtttattttaatcgacatgtatgtttcttagtttatacatatattaattctgtggtaaaaaaaccgaacaagaatatctttttttttttctatcatcaaaaagggtgaatatatgtagaggaaaaagatttgaatcaagatattagcctaaagcaataataatgttagtaatagctttaataacaaattcaaaacgtacattaatgaaccgagaggccggaaaatagttaaagtgaccactaagagaagcgaaggattcatgatgggttttcaacccagtagggcaaatttgttcaatgttctttacaaatcaagcttattaccttgtgggtgtttttgctagagatgaatgatagaattttccctagttggaagtcttttttggttactttatgggagctagtgatgtaatttgtttcgccttatggcatttcctaacatgtgcttttgtgatgtattgaagctttttttttgccttaatttatgctggattttaattttgttctttgtttcatttttcttgcttttgaaaaaaatatatagatatgtatatattaggattggtcgaggattttgagggaagggaaagacctaagaaaacttggatgagggtgattgatagtgatatgagtctatttgggatcgaagaaaatattcctttggataaggtgtagtggagggttgagggagcaaatttatgcagattagcttgacttaaagtttttctttttgattatttttcatttacttgtgttttgcaaacatttactcatgaatgatgtaaacttcttcaaccaaatctctggaaaaaaataatctacatggaaaaaacattattaatgttaacttgacagagatcccatccttgtgaagcagctagcaattaggcatctaacaattgacattttaatggacaggatagaatgtctcttgatagtcaataccctctgtttcattgtatcccatagctactaatctagtttgtatctttccaaagaaccattattttgaagtttcaccttgaacacccattttgaaccaatatgtttcttgcccttggggagaggggctaattgccatgttttgatgcggatgcaaagacacttgttctacctgagcctattgacttgatcatggatactctagggtttgaactcaagggaaagaatcaagtcttggcatgtgtggtgacatggcgtggggatggagtaaagaagagtcatagttctgttaggatatgttcttgcttgctacatagaatcgtagttctgttaggattgctatgatattatatctagtagatagattttatagttaattaggataaacatgtgatgatcatgttataataggcatgtgattagaggataggattagcttaattcttatcttgttgttagtttaattcttatcctagttttatgtttatcttagtcgaagttgtagccatataaagggcgttccattcattaataatacttagttttgctttgtgttttaaacatacttcttgattattgtttgcttgtgagctaactaatcaaaccattaaagacttttcaggagttttagtgctaaacatcttaatttcaggagtgattttaagagcgtttagtgatcttgaatcaagaaatatccttgttcttgttcgactaatatcagtggttttgttcgagttcttggagttaatctcttcaagattcttattcaacttgattgttgagcttattggtttagtaatcatatcaagtggtatcagttttccagggaggagaggatagataggattctctttgatcaacaaagatccaagggctatcaacaaggttcaaacattgctgcttgttcaagacttgatctttttctaccaagatgcattctttacgtcacaaggtagtaataacaagattaagagtggtttttacatccaagaatcaatctttcacgtccaagatttcatctttcacgtctaagattcattctttaagatcaagaaagttataacaagcatagaagaacacataaccatggagtccgagatggacaagcttgccaaagctatgcaagcacttgcaaagtcgcaaactgaatcacagagtcgactcaatgagaatactaccacaatcaatgggattggtagtaacatgaataggttggaggcacgcatggatgccattgcaaccatcatacaaaagaagcttgatcggaatagtgccaacttcataggtgccaattcagaggaagagttggcagaacgtgaagaaagatcatccaagactacatacaatgatgatcgtggcttaaagttggatgactataatggagatagcaatcgagaagacttgttacagtggattcgacaacttgagaaggtatgtgattatagaggctttgatgacaagaaaagattcaggattgcctccataagactcacgaaatatgctggaatttggcttgaaagcttcaaggcacaacgagccaagaaaggtaaagaaaagttgtgtagttggacaaagttgaaagttcaagcttaaagagaagttcttgcctagtgactatgaacaaaaatagttcataagactctctactataagccaagacacgcttagtgtacatgagtacaccatggaatttgacaagctagggcttatatttgacatagaggagaaagaacaatggaagattgcaagatacatcaaaggcttgaaccgccacattgccaagaaggtggaagtatccacttatcacacctttgaggatgtgacaaagttggctaagaagtttgaagaacatgagaaggaagagaagcctaagagttcttacacgcctaagtatgatactaatgctaaggccaaggctagcttcctactcaaagtggtatgaaggacctaagaggctaagaacctcaccccacctaaagaagacacaagagttgagaagcctaaagtcgtcgttccaaaggagaaatttgaagagatgagaaagtgcttcaagtgtcaaggaaggagacacatagcaagcaattgtcctaacaaaagagtcctcaccatgagacaatacctagctttgcaagaagaggaggatgtctattagttcgtccctgatgaagagcaaacttaggggaagaagaggaggaggatgcttttgctgaggatgatgcaaggctagtaggggtcaagaggcgcaccttacatgtcgaccatacacctagcatggagcaaatggaaaaatcttttccacactagatgcaaggtaggtgactatatatgtaatggtataatagatagtggttcttgcactaatgttattgtatctgaggtagtgtcaaagctaaacttagctacaagggcacaccctaagccatacaagttgagtttgctagatgatagcactggcatgagagtaaagaaacaagctttgatttcattctctataggggttataaggatgagttatggggtgatgtattgcctatgagtgcatgtcatctcttgcttggaagaccattgcagtttgataaaaaggtcatccatgagggggactctaatgtgtactctgtgttggttggttctaagagggtatgtttgcatcccttagctcctcattcagtggcgccaaagcaaccacctaagacaccaagttactttctatcttcaagggagttcgaacaagaggtggaggaagaaggttgtgcttatgccttgattgtaagacatgctgccacaagtgtcaagactactagcaatgagaagctcgaagccttgatgaaagagtttgaggatgtctttctagaggaactacgacccttgagaggcatagaacatgctgtagaccttgtacctggcgcccctttgcctaacaagcctgcttataagtgtgatccagtggcatctagggaattgcaacgccaaattgaggacctaattgaaaagggctatttaagggagatcatgagtccatgtgttgtgccagctttactagttcctaagaaagatgacacatggaggatgtgcatagatagtagagcagtgaacaacattacagtcaagtaaaggtttcctatgcctagattggaagatatgttggataagttacatggggcatcaatcttttctaagattgatcttcgaagtggctaccaccaaatgaggatcagagaaggtgatgagtggaaaacaacattcaagaccaagcagggattgtatgagtggatggtgatgccatttgccttatgcaatgcgccaagctctttcatgagcttgatgaatgaggtacttcgtccgttccttaacaagtttgtggttgtttacatagatgatatacatatctatagccaaaatgtggaggaacacttgttgaacttgcgtagcttattcatgaagcttagagagcaccaactctatggtaagattgatggcgacgaggttgacgggggattatggcggcagtgaatcaccctctttgccggtcactgaaatacaacctgaggtatctttaaattctgtaattggattgactaacccaaaaactatgaaattgctgggaaaaattgctggatgtgaagttgtggtgatgattgaccctggggcaacccataattttttatcactagctactgttgagaaattagctattcctgtgtcggaatcggaaggatttggggtttctctaggggatggacaggcggtgaggggtagtggaatttgtagaggggtgttattgagtttaaatggtggagttgaagtggaaacagattttcagcctctgggtcttggtaattcggacgtgattttgggtgtacagtggctggagacgttggggacagtggagagcaattggaaaacacaaacaatggggtttgaaatcgagggtgtcaagttcactttgaaggtgacccatcactggcgaggtctcgaatctcactcaaagccatgatacgtaccttatgtaaagagggtggaggtttgtggcttgagttgaaccagattgagcattatcaggagaaaacaccgcattcatcagccttacctgaaattccagttttcttacagagagtccttacccaatttcagtctgtgtttgctacaccagaaggcttaccaccgataagagaacatgaacatgcaatagttcttagagaagggtgtaatccggtaggggtaataccgtaccgttatccacagttccaaaaagatgagatagagcgcctcatcaaagaaatgttggcttccggaatcatcaatccttccacgagccctttctcgagcccggtgatattagtgaagaagaaagatgggtcgtggcggttttgtgtagactatcgggccctcaataaagaaacggtccccgataagtatcccattcccgtgattgatgaattgttggatgagcttcatggggcaacacttttttcaaaactcgacttaagggccgggtatcaccagatccgggttaaggccgaagacactctcaaaacagcttttcgcactcatgaggggcattacgagtttttagtaatgccatttgggttgacaaacgcgccggcaacgtttcaatcccttatgaacgaggtcttcaaaccattcttgcgcaagtttgtcttggtatttttcgacgatatattggtctacagtagttctgccaggaacatgaggagcatttgaccttggtgttgcacaccctagcagctcataaattgtttgtgaatcagaagaaatgtgattttggcaggtcggaagtagcatatatggggcatatcatctctggtcaaggggtggctgtggatatggagaaggttcaagcgatggtggaatggccccttcctaaaaacctccgggaattacggggatttttgggccttacagggtactaccgcaaattcgtacttcactatgctcatatagccaagcctttaactgatcaactcaagagagatgcgtttgggtggtctgaggcagcaactcaagcctttgaaaagctcaagaaggcgatgatcacatcccctgttttggcaatgccggacttccaagagttgtttgtggttgagaccgacgcatccgggtatggtctgggggcagtgttaatgcaaaacaaccgacccattgccttttacagtaagttgttaggtgcccgggctcaattaaagtcgatctacgaaatggagttgatggccatctgcatggcagttcagaattggagatattatctgctgggtcgacatttcctcattcgtacagaccaacagagtttacgtcatctcactcagcagcgagaagtaagtactgccttccaacgttggatgagtaaacttatggggttcgattttgaaatacagtttaagccggggtgtgccaaccgggtagctgatgcattatcccgcaagacagtgggagaggttgaattgggtgcgctgatattaactcatggggtggactggaccgacttggagcgtgaaattgaaggcgatcctctgttgtgcaaaattaaacaagacttccacgggggtgctattactcctgtgcacttttctttggtggacaacaagctgttgttcaagggtcgatacgtgattcccagctcttcggtttttattcctaccttgctgcgagaatatcacgattctcccattggagggcattcgggggacctcaaaacatatctcaggatggctgccgactggtattggaggggcatgcgcaaggatgtggcgcggtatgtgcaacattgtagcgtgtgtcaacaacaaaaaatgtctcaacagatgccagggggggtactacaaccactccccataccttcctcggtttgggatgacttgtcaatggacttcgtggaaggcttgccatcttccaagggggtaaacaccatcctcgtggtggtcgatcgtttgtctaagtacgcccacttcctcccactacgtcatccatttactgctgtgtcggtggcaaatgtgtttgtcaaagaggtggttcgtttgcatgggtttccttcctccattgtttcagatcgggatcgaatttttatgagtgtgttttggcgggaattatttcgtttacatgacaccacactcaaacgaagtaccgcgtatcatcctcaaacggatggtcagtccgaaatcgtcaatcgagctctggagacttatttgcgttgctttgtgggggaatacccgcgctcttgggctcagtggcttgggccgaattttcatataatacttctcctcatctctctaccaaaatgaccccgtcaaggtcctttatggtagagaccctcctactgtgatacgggttaatcggggagcctcacctgttgaaagcttggaaaacatgctccaagagcgagacgcagtattagatgccttgcagattaatctgattaaagctcaacagaaaatgaagagtagtgctgatgctacaagaagagaggtgcattttaaggtgggagatcgagtgtacttaaaattacagccttaccgtcagaaatctttggcttaacgcccttatgagaagttagccgcccgtttctacggaccatttactattttacagaagattgggcaagctgcatacaagttacaacttcctgtttctagcaaggtgcatccggtgtttcatgtctcccaactgaaacaggccgttggttccattcccgtttcagccactattccagagcaattgtcttctgacttggagttagaggtggaacctgatgaactcctcgatgttcgtagtgtttctagaggccagcacacttacttggaagctctcattcagtggcagggattaccatcattcgaagctacctgggaagatgtggctgctttccatcaccattttccatccttccaccttgaggacaaggtgaaactttgggggggtggtaatgtgatgcaccaaactaccactccactactcacctattagaggcgtaagaaaaagggggtaaatcaggaatagtttacaaattctgttgaaaggaatattttgtaattatgatgtcagaggttgttagcaaaaaggcagtagagtaacaataaaaaggggaagggaggagagaagaaggtattgagatttttgtaaggaacttggcccttgggagagttgggagcctctcgaaagctcaccattatcttgtgaatattttccttcctggttatatacaagaaccttcctctgtcaatttcttttctctctaatcttatttcttattctgttttctggttgccattgtttgaagttgcttgttgtgcttgagtaaatacgtgaagtggtgaaacccatctgaattcatcacatctattccaagtggtataatacaagcttgtaatccaaatctaatgagaaatctaagttatgaagaatttcaaaagaactaagtacccttgttttggatgcccaaggatttacttgccgctcaagttaatgctcaacgtgcaagatacaacctctttagtatcccaaggtagtttccataagaattaattgagctcaaatcaagaacaatatttttatgtattaatgtgaacacttcctgaattatattagatatatggtctgaaggttggaagaaagattagcttttaattttaagtttgagatagtttttagaatcgaggaaagattagctcttaacttgtaaactaaggattgctttataagtaaaacattagttatggaactcttaaaattggttttgaacatttctagttaaaaatcccatgtaattctcccaaactagcttaaaatctcacatttcacaagctaaggagagacaaatggcgttctcttgtgaaacaatctaaaattttcattaggctactgttttcaagtatttatatgttagaagtgccgcatataggtacataaaataagtttacaaacacaagtaggaataaggaaaactaaaagagaaacttcagccatacaaaaccggctgaaatcagctactactttctactttctagcttcaaaatctgattgcaagtctcctttaagccaatcaccaatgaaaacctttcctccacatgaagtgtgctcaaatcaagagaagaaacccatcattcgcctatagctacctgggtcagatgaagatacggcaaaaaaaacgctggaaatcagtgaaccaaaataagcaccaattggatgctttctgtccttgctacattttcttctcataggactacttcaagccatacatgaataagcagttagatccagctcctagcatccatttgatcgtacaaatgagctccaaaaagataagtaaaaccaagcagccaaaacctaattaatactaatgatgaattagttgaatagctaatgacgatgaagcaacactttagtaggaatagtgttaattatgatcaatgctacttaatcttctgattaatttttggaaaaatgtcatatctaccttctgtatacacttattcataactatatcgtattattattatttttaaataactaccttttaagtaccaaaacctaagaaatcaggcacttgatggattccatccaaagatccatttggcggggcccactaactgacttttgattttttgcctttcctcttttggttaatctcaatggttcatcaataacaactcaatcttctccccatttcatcaaatcatccctaaatcagaactttttcaaattcacccaaatgaggttatggaaacctctaccaagtttattcgaccacttttagtctagctcaaagttttacacttgcttcaaaaactaagatttattaactttagaaattaggtttttatttttattttttatttaactttgtaacaatcttaaataactcaggtgctttctagagtttggctttaattgtttttcccttggttatgtgaaagaagtatgactactttctccaagactaaagtagagagcaaaaaatgcaattctggaatttcttgcaaaagaaaaggaacgagttaatgataatgaaaaacaaagaaaatgatgagaagagaggagctgaatcaatcatgatcatgtattttaaagttttttttgctattgaagtgacttaagaagaggaaagaggatgagtgaagacaaacaaaagaaaggataaatagagggaaatcttgggcttagaaaggtgaaaaggtaagaagatgagttagtgggccccaacaaatgtatctttggatataatccgtcatgccactgtttggggcttgcttaagtccatacattacttcactaattttacaaaatttattttcttgaccaagaactgaaaaaaccttcagtggtgatctattaggttttggaagttaaaaggtagttatttaaatgtttttaatataaaaggtagttatttagatatttttaatataaaaggtagttatgtgaataaaagtgtatataaaatgtaattttttgacatttttgccttagtttttcttgctaattcaccttttcaacttgaccaagttgctatgaggagaaaacgagcaattattaagcaaatcgcaacactagcattaatccatggcccatgaaactctccataattagagattggattagcacttagtagaacttcttgctcctgctccaggtttccattacttctttatctaagtgcatcaaaaggttgttgggttatgaaaggtggtggttgtgtatagtcattgtcaaaatgttgttaatgcactctatttagaggatgagggattgaatagttttcacctcgtgacctttcattcctttttaaaaaaattgataatgtgtattggtcctatgactgtatgaatggtaataagctatctcatgagctgttactatcttcctcagagtctaggtagaagggtttgggctgataattttctactatgtgcaattagtttgttggatttggatatgctagttgatataggtcctttcccttgggccttctcttaatataggcctacagtgtgattgaagataaatcttctggagaatataagaacaatgagatggattggttagaggttgatttgttcttttggtgtaagactatttcgggttctctattggttatgttcagacgccagaatatgtgttggtgattgttttccatgaacatactttatccgcagagacatttttcttttttcttcctataagattatatttgtttcctctcttggtgctcatctcagtgtctctactttacgttaaactgttgacattacttgacaatgcgtatatttgtcgcatggtgctcttccctcactccacgtcgaccccatacatcaaaaaatgccattaaagaatattcgaactcacaaccttgtgttgaaagaatggaatccctaccaatgactcattaattcattttctctttaagaaataaatgatttcctcacaaacttttaggctttaagagcccaaaagataaaaacataaaataagatagacatcaacgtcaagattagccttaaatgcacaaagcacatgtcaaatgattgataactactcacgagttgcaactctttgggcgttgcctaatattaattggatctcttttaaaaattgttggtggttatggttggtggagaggaccatgtaacttttagctggtcacaactggtaatgattgtcacttttactgcccataaaaaaatttaaactgttgaatatgtttctggcagtggatctgacaaatcctttacaagttggcgtccattttgttttgccatgtgactcaattataatacgtgagttttattatccaccaggtttggctcactaatttccggattaattcaatctaaactgtctccaaagaaggaaaagggtggaggaggaaagccttcttctaatgaaaagacacgcatacgtggttcgttttctttccagggtggaatgcaggtattagcatgtagctttcattctgttaacatttgtggttcttccagacatacatccaatgctttttttttttcttgctataaccataaacattcttgtcatgaacattctttaatactgttgctgagcttagtgtattcgttcattcatgtaatttcctctcttgaggttaaaatggcatacagccttacaacctatatccataatgctccttagagtagaatccctaggttataacatagtaccacttatcaaaataaacatggcacacactgcaggacaagaagtaaatccacctagagaactgagcacctagtagtaaaagcagcgatacattactaataacagtagcagggccataagagtagtaaatgggcctcatttcaacactccccccgtaatggtgagagagaagaagcagtctgaactcccagcttggagagcaaaatagagtgttgctgaacagggagaaccttagtgaaaacatctggcacttgatcttgagatggaacataggtaggctgaataaccccttcttcatttgtattgtccctcaggaaatgacaatctatgtctacatgcttggttttctcatgatgaactagatatgctgctatggcaagagcagcttggttatcacagtagataggagtagcactggactttttaatgcgaagatctttgaggagttgtttgatccacatcacctcacacacagcaagagccatggatctgtactctgcactgaccacaagaaattgcctctttgactttcaagatacggggggagtcaccaaggagcacacaaaaccagatgtagaatttacaacacccatcccattcactatcacaaaatgctgttagttgagcactagacttgttcgccatgagaattcaccctgttggcagcttgaagatgcacattagtggggcagtgcataaatttgcttaaatcatgtatagtgaaggcaatatcaggcattgccttgtaatagtgagataaatgagcttccccatcaatttttgatacacatcaggttgttgaagaggatcaccattgtcagcatagagcttgacatgtgagtccatacgaagcctcaatcgtctgcaatttataaaaccatattcatcaacaagacccatcacatacttctttagagataaaaacgatacttcactacactgatccacttcaatcctcaaaaaatatcttaggccacccatatctttcatgtgaaattggccagcgaagaaactctttgcttcctcaatagttgctaaactattgccagcaagaatgaggtcgtccacatacaccaatatagcactgaaacagtgagagttttgcttgaagaatagagagtagtcacacttggattaagtgaatacattttgctttaaagcagtgttagcttggcaaaccattgcctcaaagcctacttcaagccataaagtgacttaagcagcttgcacaccttagttcatttggtgtcacttctgccatcagtacttagctccccctctccttgaactttgatcctgttacatgtttcactatatcctggtgatagcttcatgtatacactatcctacaattcaccatgcaaaaaagcatttttaacatccatttgtttgcaagaaccaaccctctaaggatgcaacaacaagcatgtggtcatctttgctacaggggtaaaagtctgctcataatctattccatatctctgtctgtcacccatgattacaagccttggcttatgcctattatttgtgccatcagtgctgtattttgttctgatccatccatgtgagggatggctcatttctacaaaatcctagttccgttaggatttgtgttgttttcctaattctagtaggaataggactcctaaaatcctaatcctcctagttctgttaggagtttaaaagttttagtttgattgtaattctagttgtgttagaaatccaaatcctagattcatgtcacgtatggttagaacatggctagtaggataatttgtcttgtgatgtccatagccttggcatttgtggcacctaactttcaatagcttgtcttctgtctccttttctttctccttctttgaggaatcaacgtttttagagctatctaaaccactagcatcaatattaggtttaaaagtgctaaaagatttcgaatagttcttacttgcatacaatttctttttctagtttatgtagcgtcaccagggaacaaaaactcggccgttccgttctggaacggccgctttgtaacggatttcagagaggccgttccgttaaataccgttctagaacggtgatttggaattcacaccaaactcggcgcgatagcgttacgtaacggtgtaacggcgttccagaaccgttacaatcacataacgtccgttatttgaagaagaccagttcttttggtggaggaagaagaagagccaacgcaagatctatagatctgagttaaaatttgaaaataaaacatgtttttttatttaaattaaagcttacagaggatgtagaactcaaattcgagtaaacccctcctttaatttcattaggttactgcaaatcgaaccctaaattgcaaaccctaatttcgaaaaaaccctaatatgcattgggatgcaacgctgcttctccggtcatggcagagaaggtcgacgagtcatcttcggctgcttttagcactgtagctgccggtggttggcttgtttgcaggttagtgcttgctggttttctttctctcataccgatcatcttcttcttttctctcttctctttttcttttttattgtgtgactgccagtcacgtgataattgcaactcataaagtatctctttctctctcttcttttcatccctttttatttttctttcccttttagtttttattccctcacgtggaatcacctaattttcatccttttttatttttttagttacactcttacacagaagtatgttcaaatatcattatagtacctcaaatattgtatttataagagttttggacataatatgatatagaaagtaaaatagaagaaaaataaagtttaaatgtcacttgtgtgatttttttaaaaaaattcacgccgcgacggccgcgaaacgttctatttcccgttacaagccgttcccgcgataacgcgaccgttcccgcgaacgcgaccgcgaccgcgttttttttccttgagcgtcacatcttgcaagcttcttcaaaggtgagttatgtgtacaactccaatttctctccaatcccctccgtcctcatttaggcctccaaggaagctacttaaacattgatcttcaagttcatcaattttccaaagaatggataacttctcgaactcctttatgtaatcttcaacggacatattcccttgtttaagagtagaccattccatgtacaagctttgtttgtagttagaaggaacaaaacgtcctcttaacaactttttaagcttatcccaagtagagattttgggtttattagctttcacacgctgcctctttactccatccaaccaaatagatgcatatttggttaccttaagcacggccaccttgtatttcttttcttttggtgtctcttaatcccaagtagagcttttgcgtgtgaaagctaataaacacaaaatctctacttgggataatcttcttcttgtttccgaaacaactaattcttatggtagttaggaaagcaagaatggtttctaattcaatagggaatatattaattattattagtttaagttaaatagtgcacgaatctaaatagattattcgtctcaaaatctcacttaagtatagatttgtttggacatctgagggaagaagaagagagcgagataaaggagaattatcactcaatgaatccatatcccgagttttcccatttacttctttgaaagcaatatagttcacgaggtcttattatcagtctatggacataagagtaataatttaagggcaaaaactatgactttatgggtttaaactgatacatgttctgttaaactgatagatgttctgtgttaaaccgatactcatatattcctggttaaactgatagatatatgatttaaattgatacccgtctcagtcatgtcttggattgagacggtctgacacaagactttttgtgtattatatatctgattagaataaatttatcctgtttactaattattttatcttctccagacacttgttgacacaatatgcaatcagtttggtaaagatgaactcaaactacagtgcaaggtcctttcattgtcctacagtcataaggggatcccttcttcagaaaattgggtcgtgtcttctgtgtcaaaaaattccattgaagatcaacaatatgatgctgtcatcgttaccgtgagttttactttgcttactgctattgcaccaatctttcttcttttgacacactgataatggcaatgctgttgtggtttgaagccatgttatggggttttagggatatttatggagtctgatctaatatgttattggataaaattcagatctgtaacgtgactcaatgagattgaaaaaaattgaatcaagataatggattggaaaattaggagctaacctagggtctataagcgatccacttggagtctcataccaagcaggtattcgacattttaggtttatattgctgctatggctcatatgggagcctacatagggtctggtgcttattcctttttcttttgtctagttttggggctgcacatttctgttgtgttttgatatggatagccatcacctgcaattgcatggaggctgaactaagttctataggggagcaaacagtatctgttggaaatttattttcatattgtgtttttaaatgctataatccaaaatttgttgttcccctaaaatgcctaaaatacccttatgtaactgctccatctgtcccttaatagacttcccatttctccaatgcatgtttgccaatacacattttgtattgttaatatcaaaaattacatattagtaaaaattataaaagtttgattttcctaatgtacgcaatgagacgaatcaaacaagacgccatatgactatgttttttcttatacttcctatgttttttaataagtgacatgttttccttttagggaaatgtcacaataagtgacacatagctcaaagtagtaaaaatacttctcatttattacatctttgccattatttaattgtttcacctacctactttatccaatactcaaatttgattggttgaacaattggtcccaactttctctagactccttggtattccctttcccccactttctctctgtgtcacttattaaaaaatggaggacgtatattggaaaaaaattggaaggttttcttcacttatgaatagtggtaaaattagagatgggaaggctattttgggatggatggagtaatatttaaatttttaaaataatgtcattgttttagtgatgaaataaaattcaaggctattttttctagtaattatgttatctgtacatcaccacacgtatcgcgtgcatataagactagtttgatgatattccaacactgttcgaaggaagtcaggcatggaaccatgtttgcttccatatgggaaatattttgcttactctccttcaaacatctacctcattatcccagaatgattgatcgaatctaatacaaatatacaattgatcatatgccaccagggaattacatcaaattaaatttttatagaaggggaatcagtcatagcctcatagggaacgaataagtgatactcgccagtttctttcctggttacttttcctcttctcactagccatcctttatgtatgggtatgctgcatcattcctgccactggttgggactcccgtttgaactatggggggatgggaaagctaagccatcatcttcaaattgagtttcttgagaatgtaagacaccatctgtaagatgaatatagtgcactctatagtcaatgtcatgatctttatgggtttatctgctgaaataactgtgatatacccagctctccatttacaaagttttcctacatattaaactcttgcccgcaattctagaacttcattgtagaacttttcctacataagcatcatttgtcttttctgtagtaaaagttagaaagagctttattttagaacattcgtttttagttttctttgttgttgattactccgccacttttaatacttttatgattcaagtatttgacaaaatcatgtaatttaggtcctctgctgcatgcagtctataccctctctctctctctctctctctctctctctgtggttgtgtcttacttgttgagttactaactccagccattacataaagtaggctggcattatgatgagcaaattactcaagaccacatgttagctcctttttcttttctccttattctgaaaggcaaatataggtccatcttggtgcttctcatgtcataagtaagctgaccccctccttttccagggaataggacaataatccaaaagtgagggttttacatgttgggatttgtgaagtttcttattttacttaatagccgagtcagtgttacaatacatagtaccgtgttacaaaatagtatgtaacaccaagcatgtttatgtgcaaaattgtgcaagactttgttgctggcacgccaagggctgttttaatgtagtttacttattcttttaggtttttcagatgacaatcataaagggaattaggagtgtttttattgtagtcaatccctattgtgctacaacgataaaagaaaaaagcacaagactagaaggagaagtaatgtctaggaaagactcctcacctggggttgctagtcacctacacatcttagaaggcatcaaaccaaagcttattcccctcgactgttttcgggagaaaagaagacaaaattgtttctaacttatactttaccagtttcactacagcatcagaaagaagcaaaatatgctcccacaacacggcgaacctagctttccagatgtgataaaccagaccagcaaaatgattattttcactagagctttgagtctattttttcggtttttccccttcttcctggtaatgtcacgccaccaagccatcatctcaattttttgagatttgacgtaatcgctcaaatagctgagtaagacacttcttgctctaaatactaataaaaaagaggtgaatgtgggtctcagccatgttactcaaatcggataaagtgtctactcttattagggtttttgggtgttggactcatccatttttttttgtaaaatgtcaagattttggtttgaaatgagagattcaagtgtcgtgacatgagtcggcacgcaacacttaaacgtgtcgaagtaacagagggtctcagacaatcaactttaatcaatcacgaaccccaaaatttatgcaacctttgctcatattcagtctctgtaaagcactcaactgcagcacacccacccattcgcttcacctacagcaggagggcacccaagtaattgctatgatgagcgaattattctgttttgccttgctggaatattgctgttagatttgctgactcactggcagttaattatagtcagagaatgagaaatatcctgtagagagagaaagggtatcttttgtatttagctctataaatagctaaggaagggaagggcattgagagtttatgatattataataggagagatttagcctctcgaatgctgataggagcgtagctcttgttggattatcaatactactctgtttgctctatctatttctactcaggttccttcttgtacagtggatccctgattggatttacttcatcaaccagcagataaaattatttgtaggcacattgaaaccattccaaacctaatgaggccaaagtttatcacaaagaatataggagccaaatgtaggcaacagataagagtataattgccagaagttgaagactccaggtattgttcagaaaccttaatgcatatcatcattctgacactagattttccccggagccaactaacaaaaatgaattaaagagattaaggctatgtttagttcacctgaaattttctgatctgaacttatctgatctgatctgaacttattttttctgatctgatctgatctgatctgaaccaatctgattacaagatcttatcttttagatttttctcaatatataagaaaaaatatagtcatgtggggtcttgtttgattcgtctcaatgagtactttattaatattcaattattataatttttactaatatgtaatgaaagatataatgatttttaaatataagcatgatctgaactgatctgatgtgaacttattttttctgatctgatctgatctgattagatctgaaataagcaaaaataaggtgaactgaacatagcctaagcaacaattgagggaaaataagatcattatggctaagataagataaatatgtaatgataaaatcagagtaattatatcagttacactctcaacattcgtcagattgaggtttcctcccaaaatgccaacccacttttctgtattttcacgtccttctctctacccttctaggtatatattacatcagctgtaaaatttttgaaccaactagtagaatactgatctaccctcaactgcctcactttctcattttttctgggcctttttctctctagcacaagtccacataagtgatgcatagcagaaatataattccactagtcatcctcaatattgatataacaaacacatcacccacatattatcatttttaatcgctgcatgcgaggcatacttacccaccaatcaggatatgcataacagcgttcctaattccaaaaccaccatatatcttgggtttgcaactctcatccctagcaacaaggggactttctgaaaaagtggcagattccgcccacaagtagtttgtacggacacctttattatattattaatatcatatttcggcaacacaaattaccagcccagtaaaacatgaattgacatgagactaacaaggggcccaatctaatatcgtacgtctgtactaagcaatgtataaaaaaaagctcaaggtgcattgatgcaatagggatcctaatgtgcataggtgcgcctcattgaagtgaggcaccactaaggataaataaaaaagattgatgtaaaattaaattgtgcaccttgggtgcgcctcgatgaactttttttgtgtgcctaagtgtacctcaagtacgcctcattgatatcgcctcgcctggcagaaaacgagcttgaccccaatcgccttgctccccaccgcctaggcgtgcctcagtcacactttttaaatacattggtattaagtactcagaatggcaaaaagaaactttgggcattaattagacatttcactttttgtgcaactatttgtgacttcagagattgatatgttttctacattacagacttttgtgatggctgcatggtctccactgtcaaagaacattagtttaagtagaagaaatattgctctattaccttcctccctctacaaacaaaatcctaaaatgtggttatgtagtgccaattcaaacttgtagatgcatgactaatgctttcattatgctgtgggtttttatactatgattcatgtccaattacataacaattagctggagtcaggatatgtcacggaaattttaagcctggcaggatgattgtttatattttctctttttcggtgtttaagtcaaagtaaacttctaggctgctcttttataggctagttgggctgttggggagatctacacattaagtgtgaagaaatcttgtctaactccagtttggttgagaactgtaagctgtcataacatttgttgcatgatgaggccttgtgggattatcatgttagctgtaaactctaaacttacttgaaatctagtgttgtgtctccttatttctgtagtcaaaattgaaccttctgtacgtttttgatacctgcgactagaatgatggaattctgaattactgatactattacaaccatctgctaagaacgaagatgactcttagctaatttctcagcagatttagagaaattaagaagaattactaatgaatatttaaagagaaaactaccaagatatgattgtattgatgaaaaacaccaattacaacctaaccaacattcgagaggttggagctctcccaagtaaccatttctctcactaaacttatcaattttcaagatgccttttccattctcagttcctctatatttatactactccccttagcaaactacccaacttattccccaagtaaactaaagagataatatctaaaatacccttccccctacaataatattagttcttagcattaccggccccctaaacttccaccttgtcctcaaggtgggtcgtaatcatcactaaattctgggcctctactcgtatattcagtgtcttgcagcccttcaggccccaagcctaggttatgcagctcgtgttgcggctcctcctcatatagttctctggctggagtgagtgcctcaactataatgaaaaagtcctggaggtggggaaggaaggagtgtctgaaatggtgtggtgtgctgctggtgttatgggcttgtgcctgaaagttttgggtttaaagagatggagtggagaagagtggagaagtgactggagacgtaaaagaaggaatcataatttttgtaagtggtgggttgaaaaagttggtgggaagaattgtttttataaaatgtagtgtaatggtcgaaaaatgggtggagtaagtatggtttttggctggggatgtggtactgggttgaaaataaataggtctgagcttacttgtaaaattggcctcaacatgagcaggcccaatatcttgagccaattccccaaaagctggcaatagagcactcttaattgcattgttgtgggccatcgggctccaaacatatattcggaggagccggacttctttggtgatgtcattagcttggcccattgcacactttcccttaacagcctcaagatcttttcccacttttgtaccccaaccacgtggcttcaccatcctttctttcttgcttttgtcacttttttggcaatatacgagtttgtccttactaccctcatcttctaatgttggcttcctcaccaagcttaatttctggaattttgtccaccaaatcccaccacccatcgtcaacaccatacctatctacaccggccaagaagcctggtcctccacccgaattttcgccacagacaaagcctgaacaaccgtcagttctctcaccggagaagttcacaggtccaccacctgacccactagttgctgatccacccttcacaaatctccctcctctggctgccacaagtagtggttcctccgtaatactcatatttctcgtccaagagccctggaccaccaccggacccacttccaccggcaccaacttgttcaaatgatacttctctttcttttccaaacagcctacttggactggaaaaaccactgcgattgtagcctccgccagatctgtagcctagtgcacctaacgtgcttccaactgcaacccaatagggatggaaatggatgggattcggggagggtggagcatcacccgcatccgtcacccgcatccattcgctccacccgctccacccgcatccatccatccgtcacccacgggtgaaacgggtgggtcggtgataaacgggtggaaccatttagggggtgtttggtatcatgtttttttacaaaagaaacagaatcaagtaacaaaatccgtttctacttgtttggttctatgttgctcagactcgagtacccatgtccgacacgggtacgtgtccaagtgtccaactcagctattttctagaattttttatattttttaacccaaaacaaagtgtccaagtgtcccacccatgtccgactcccgaggatccgacacgggtacttgaggtgaaatgaagagtccgagcaacggaggtttggttagtgtgtaaagtaacaattaccgttacttgaggaaaacacatccccccaagttgtttccattcaaaaacctaaggaaacaaataacgtttcactcctcaaacaagaggaaagggaatgggttatatttatttccattccattaggataccaaacaactaataagggtaacacttattattatcctttcccctccttatcaaaatcctttccattccgtttacggtattcataccaaacacccccttagtatattttctaatgaaatttgtgatatgatatgcatgatataaaataattctatcaaaaatataaaaagtaagtaaacttacatgtacaacttaatagatgggtgatgggttggaggttaaacgagtgatggatcgggtgacgggtgaagaaattctcacccaccactcgctttccatccatttaaattaggtttttcatccatttaaaaaaccgggttaaacaggtgatgtatgatccatcacccatttccatcctcaaacacatcccgatttgtttactgcaccaccagatccaccagtataaccacccgaaaaatcatcatgccttctactagccttgtaacctgctcccggtgagaagcttcttccacaagtggtggtcgctggacctccatctccttcttccccaaaaaattttccatgacacccactcgacccttcatctgtgacaacctcttcttcgtccacctctgaagttttggggtcgtcttcctcctcaagctcctcttgaagtaactttaacttccgttggatgggagagaacgcttcattgattatcttcaccagatcttcttgaagtttctcgaaactttttctcacgttttcctctacctctttcgtgatttcctttccgatctccttcatttttagactaggagctcttgcgattccatggcagatttctttttttaaaacaagaaaatcaggcacttaatctcccagaatagtggtgctctgataccattttctaagaaccaagatgactcttagctaatttctcagcataacaacaaatttagagaaattaagaagaattactaatgaatatttaaagagaaaactactaagatatgattgtattgatgaaaaacaccgattacaacctaaccaagaggttggagctctcccaagtaaccatttctctcactaaacttatcaattttcaagatgccgtttactactccccttagcaaactacccaacttattccccaataaactaaagagataatatctaaaatacccttccccctacaatattagttcttagcaccatcaaactgggatggatggttttgtaaggttccaatttacttctccatcaaaatattttaggattttttatctcatgtattttagagtttcctcgtccctttttatctgataagattcttctgatgatttgattttatggtaggctccaatcagcaatattaaagaactgaagattctgaaagctggagttccattttcacttgacttcattccagaggtttgtatttttatagtggttagacatgcttcccctagttttcaaagtaaaagcatccttgttgtgacgatattttttcccttgtttttgtttttattattatcatcacttatttccattttctattttccatgctgataagatgttcatcaccataatcttgtggtatcagaagtgtttagtggagtttattcactacacatgcagttgttcttttgccatgaccgccattcattttctcgtcaaaacaaatctatgaagtttggttttcagactcatggttcttgtagctcttgtgaatttttttttcttctccttgcatgcattcttcaaattacatattgcatataccaggtgctctcctttattttatatttaatttttaaaattctatcatatattttttaatgtcaaacctcaaactaggggttcactgcatcttaggcttaccaggctaatatttctttacttaaccttttccctttatatttgctatcctcttgtgtagtaatcaccataagaagggtacaaactaaattaccctcccattcttttgtatcattctgaaatagtgtcacagagctttgatttttttgccctcatttaatctggcaaatgttctctctatttttttttttttactttcttttgacgggattctcaggcaattgttacggggagcagccagtcacactgtttctgtttattatgcaggtgagttacctgcccctctctgttatgattactgcgtttaagaagaccagcgttacaagacctcttgagggcttcggagttcttatcccttcgaatgagcaacataatggactgaagactctcggtaattgtctggttcacgtgtgtagcgaatcagattttcaaaccctgatttcgtaacattgcaggtactctgttttcatctatgatgtttccagatcgtgctttctccgatatgtatctctatactacctttgttggaggaagcagaaatagagaacttgcaaaagcttcaacgtatgagatatgcaatgttttaaatgtatgctatagtcatcgtttcaaccttttggtgcctttttcttactaatttatcctcctggtttaatgatcttagggatgaattggagcaaatagtttcgtctgatctccaccagctgttgggcactgagggaaaacctacttttgtgaagtattgatatctttcacccaacttaacatgatttgtgcttataatatgttaaataaagtaactgaaatcctgaaattaagactacgaaactgtatggtgacagtcatttttactggaacaatgcattccctttatatgggcacaattacgactcagttctgagagcaatagaaaagatggaaagagatcttcctggacttttttacgcaggtaatctgtcatttgcttgttgcgataaagttcatgtacagttggcatatcaatcaacttgcattctttcttgctaactccaaacaatcaggatcattaacttgtaggctgcagcaacagagagtatctcccaagttgttaggtttcatgtaacctcgtcgctgagatgaaatttccgttggctaaaaagtgaaagttttgtattgatgttacccaaaacaaaagtattttgcatgttgcttgaagttttggttgtttcagatagtacatcctttgacatgaaaataaatggaaaagcgtatgtcaagcaattatcatctagtttctttgtttctagatactagccgcatttgatcccagatcatttttgaggaagtcagctgaaataccgtagctatccttcagttttcataataaaactttaatggatctgatgtacagtaatttagtgtgcaccgggttaataattgatattaacttcatatagtgagtcttataaagatataatgaacttatatacaatatagtggattttattaatggaaaacatatagtgaaactatatgcaatatagtatgatacataaagacttagacaacaagagcattcgaaattacaaagaacaaaggaaagaacaattgtatcaaaccggttcgaatgaacaaacaaccaccacttccacaatcaatgtaccaccaatcaagactaaactataacaatgagcttctagtttaagtctactttgagttttaatcaccaattcaacgattagatgatcaaaattgcaaaggttaagagttggtcaaacctaaccaagagttacactaggcacatagctttgttaggagtatattagtttatgaattctagttaagttagaaatccaatacctagttggattaggattcctaattggattagaattatagtttagttagaattctagtaatagtaggcgtgtgattaggagatataattagcttaattcttatattgttagtttaattcttatcctcgttttaggtttatctttagtcgaacttgtaccctatataaggggcctttatttcattaataatatagtttattttgagtttaaacctttacttgtgattgtttgcttgagaggttattaatcgaaccattaataacttttcaggattgttaagtttttagtgttaaacatcttaatttcaggagtgattttaagagtgtttagattcttgtattcaagtttcaggactgatcttgaatcaagaaatatccctagtttcgactaatatcataagtagttcgaattcttggagtcttttcttcaagattcatattcataacttgattatttagacttcttggttttgtaatcatatcaagtggtatcagttttccagggaggagaggatacaaagggttctctttgatcaaagaagatccaagggcatcaataagaatgacacttgcaataagttcgagtgatacaaacaacttcaagactcgatcttttgctaccaagaaccaatcttgacgcctgaagattgttaggacaaaggataagaagtgtttctacatccaagattgcattctttacgtccaagattgcgtcaagatccattctttaagttcaagaaaggagtagaaagcattcgaacactacttaaacatgacatccgagatggataagctggctatggccatgagtgccttggcacaatcacaaactgagtcacgcaaccacatgggtaggatggaggcacgtgaccgtggattgaaactagatgactatagtggagatggcaatccagaagacttgttggagtggatttgccaactaggcaaagtgagtgattataggggctttgatcacaagaagagattcaaggttgcttccattaggctcacgaagtatgctggaatacggctcgaaggattgcatgcacaaacttcttgcctaatgactatgaacaaaaacagttcataaggctcgcatcaataagccaaaacacacttagtgtacacgaatacagcatggagtttgacaaattagggcttatatgtgacatagaagagaaagagcaatacaagattgcaatgtacattaaagggttgaatcgatatatagccaagaagatcgaagtctcaacttatcacttctttgaggatgtgactaaattggctaagaaattcgaagagcatgacaaagaagaagggcctaagagttcttacacacctaagtatgactctagtgctaaagggaaatcaacagttccctactcaaggtggtcggaaagacctaagaaccccactacacctaaggaggacactagcatggagaagacaaaagtggccgtacctaaggagagtttaattttgtgttttatacatctttgcttaagagcttaacaattgaaactattaataacttttcaggatggttaagtttttagtgttaaacatcttaatttcaggagtgattttaagagtatttagattcttgtattcaagtttcaggagtgatcttgaatcaagaaatatccccttgttcaactattataattgatcttattcgagttcttggagttaatttcttcaagattcatattcatacttgattattagacttcttggtttagtaatcatatcaatatcattagcattaatttacccccagggagattaagaaaggattagcctaatcaaggcgcttaagaagtttttaggaaaaatcgtgcttgttaagcttaagaattgaacttctttcaccatttgcccttgattctcttgttgaactagaagatcttggttcatagtagatgctcctgcatcatagtagagcatttaattttaattttttaacatgcacgaagatgtaggtagtgtagtatatatcgtgagacgtggtttaacatatagaaagatgtagtttctgcatgatatagtgagtttttgcatgatatagtgaatgtctgaatgatacagtggatcgttccgaattgttgtagtttgtatgatatagtatttttgtgaatgatatagtgagtttcttcatgatacaatgggtttctgaatgatatagtggattgcttagaaatgatatagtgagcttttgtatcatgtagtaggtttctatgtgatataggttgttaaaagatgatacatgcttttggcctcatgtactctaatgttaacgtgaacccggtccttgcaagtcaattgcagttttttcaatattaagctatttttttttttttttttttttttttttttttttttttgtacgggaatatttagcatctttaccacaaacataaccatacgaatattatgcggaaattccagtctgaagtcttaacttttcaaaattaaaagcttctatattatttttggaatgaaaaaaaatgagctatggcatgttattttgaaatacaatgagtctcaaggtgcatagtggcttcaattctacgaataatgaatggactactgatttctaattttttgttccgggcttttgcattaggtaaccataaagatggactctctgtgggaagaactatttcctctggatacaaagctgcggagcttgtgatatcctatctcaactctacttaagatgcctaaatgatcgaggagactccgtaagtcctttctctgattctatctttgaactgagtggaaacacgactgtggtctaaagtagttgatgtctcagatatccagaaatggcgttagtgatattcaggagctgtccattgaccctttgattcattgttgcagtttactgaaagttgttagctggtctcagaaaaacgaaaggaaaaaagggggaaaacaaaaacaaagaaacgtagattgtggtgttaaaatcaagaattccagagatttgtaccttctttatcagttgaattgtttacagtgtgaatcaagaagttagctcgaccttcttttcttgtgaatggtaagatttcgtgatcatcaatacttgattgtgctgtttgcaacttcaacggtaagatttcctgatcttacagtttaattgcttgtgctgtttgccactt

SEQ ID NO: 45 - DNA, 1575 bp, synthetic construct
  misc_feature 1..1575: note = R126L mutated Beta vulgaris PPO2
  source 1..1575: mol_type = other DNA
atggtaatgctatacgattctcacctctcaggagtctcaactcatcttcaactatcgcaggcatttcccaggaagaacccattaatggccaaagtgtctgagccgggtaaacccacttctgctaaaaggattgctgttgttggtgctggtgttagtggacttgctgccgcatataagctaaagtcccatggcttgagtgtgacattgtttgaagctgatactagagctggaggaaaactcaaaactgttgcaaaggatggtttgatttgggatgagggggcaaatactatgatagagagtgaagcggaggtcacgagtttactcgatgatcttgggcttcgtgagaagcagcagtttccaattgcacaaaacaaattrtacattgcgagagacggtcgtcctgtgctgataccttcgagtcccattgcacttctcaagagcaatatcctttcagcgcaatctaagctacaacttatgttggagccattcctttggagaaaacgctatgcttctaagatttctgatgagcatgctcaggaaagtgtgggtgagttttttgagcgacattttgggaaagagtttgttgattatctaattgatccttttgtcgcgggtacaagtggaggagatcctcagtctctttctatgcgtcatgcatttccagaagtatggaatattgagaacaagtttggctcactaatttccggattaattcaatctaaactgtctccaaagaaggaaaagggtggaggaggaaagccttcttctaatgaaaagacacgcatacgtggttcgttttctttccagggtggaatgcagacacttgttgacacaatatgcaatcagtttggtaaagatgaactcaaactacagtgcaaggtcctttcattgtcctacagtcataaggggatcccttcttcagaaaattgggtcgtgtcttctgtgtcaaaaaattccattgaagatcaacaatatgatgctgtcatcgttaccgctccaatcagcaatattaaagaactgaagattctgaaagctggagttccattttcacttgacttcattccagaggtgagttacctgcccctctctgttatgattactgcgtttaagaagaccagcgttacaagacctcttgagggcttcggagttcttatcccttcgaatgagcaacataatggactgaagactctcggtactctgttttcatctatgatgtttccagatcgtgctttctccgatatgtatctctatactacctttgttggaggaagcagaaatagagaacttgcaaaagcttcaacggatgaattggagcaaatagtttcgtctgatctccaccagctgttgggcactgagggaaaacctacttttgtgaatcatttttactggaacaatgcattccctttatatgggcacaattacgactcagttctgagagcaatagaaaagatggaaagagatcttcctggacttttttacgcaggtaaccataaagatggactctctgtgggaagaactatttcctctggatacaaagctgcggagcttgtgatatcctatctcaactctacttaa

SEQ ID NO: 46 - DNA, 37009 bp, synthetic construct
  misc_feature 1..37009: note = F420L mutated Beta vulgaris PPO2
  source 1..37009: mol_type = other DNA
tattccatcgaatgtagcaaattgactgtccgttgcaatttcggagtttccactcgtcgcatggtaaatggtaatgctatacgattctcacctctcaggagtctcaactcatcttcaactatcgcaggcatttcccaggaagaacccattaatggccaaagtgtctgagccgggtaaacccagtaagtcaaacattcgaatcacaactcaagcaaatttgtcttgtttgcgttatattttgctcatttcagccttttttgtttttccgacctttgcatactgaatattgtgtgtgtgtgtgtgtggggtttcagcttctgctaaaaggattgctgttgttggtgctggtgttaggtaaattttcgtctcttgcagagtttttgagtcatttgggaattctatgtgaaacttgtaactcccttcagtccaacgaacgcagtacaattttctatcaaatcatggtcctaatttccaattttccatatatattgttggaattatattgggattgtctatcactattaatagtattaggatcaattgtagagaagcacagaaatttttgggatcgaaagaatatctggattgccacattaacagcagatataattcttccaattggtttttggttcttcctaccttgacttgtctggtcaaacattataaactttaacctttaatatccattaaagtaaactataggatttttttgtctaaaacatgcttatataacatgaaatttgtgagaaaccaccttatatatatttttttgcgaaaacaaaccttaaacaaaattattatcgtgagaacaaaccttatgccaatttcgatcattgacccaaggttttggcattgaccgtgtcatgaattttgttgggtttaaaaagtcatgtgtcttgcatacgaaatggtaaatgcgggaaccttgggtcaatgtttggaatccgcataaggtttgttctcccaaaaaatgtttttgttcaaggtttgtttttgcaaaaaaacttatataaggtgctttctcagaaatttcatgttttataaagtagtatttgacaaaaaaccctaaaatatattatagaattattattgactaaattgtgtaaaaatgtactcttctaaaagtacattatagtattttagtggaacatttgcgagaaactactttataaatacgatttttgcgagaaatttcctaataaaaaaatgtgaagtgcaaaactatcttattgataattttctactccctcaaatccaaaatactatgaagtctttcctttctggtttgtcccagattagtttgtacgcttccatctttggtatgatcccacttttattatacttattagttttacgtgagttccttactctatctcttttaacaaaaatactcaactatctctatccaataaaaagttccttactagtcctatcacatctgctttttaataaaataacgtttgataaccacacaacttatatccttaaaatacacgttcaaccaagtgttgagattaatttggacggagggaataaatattttttgaggcatattggtagcagtattcggattccgataggttgactatgtttccaatgttgaccaacacttgccttgcatgtaattctaactttgctcttttttattcttcatttccctcgtattccatatacaatgtttagagacccattccttcctcttctcttctttcccttccttactatgctttgccataatcttcctcaaatgagtgcaaattaatttgtcgttgatgtaggccaactgattgtagcacatcttcatagttcatacctcaacacactcgtaattatattataccctacatgttaaatggctcatgaagctttattttatatcatacttcctccgtttcacaataagtgtaacacttttcttatttggaataatcacaataagtgaaaccaagctccaaatggtaagaaaagttcactcttattacaaatataccaccaaaaagtaagaggggatcacaacttcaatacttcttcactctactttattgtggtcccaactttctctctctaaattccttggtaactccccactttctctatgtttcacttatggtgaaatggaggaagtattttgtagtggtatttagctactaggccttggatgatatacaatcatacaatgtatttatattcacgataatttgctgcccaccttgattaccatgatttccaccaattttatcaatttcagtacttcaccaccccgaatttatattttttatttccaaccttggtatctccatttgtctgagtgcccgatccatttgtatcgcctccagaattgaagaagcttcctgcagctagacaattaggaaggttaaaaaagtttggagatggtggaggatagccataataatcattgttgggaggtggaacttggaaggttattgtagggttgaagtccttgatgaagaagaattgagttcaaatgagaggaaaaaggagcagggaagagggacaataagaaaaaaaagggtaaactaaaatcacgtgtaaggcatgtgcagatcaacatcagaaagcatagtcaacctactggtattagggcactgatacctttttgggtcaaaatttttttacaaggtatttcatgaggtagttttgtccatttttttttttacaaggtatcgtctcattttttttttatcatttagtttctcgcaataagtgtatttcatgaggtagttttttccaaaatttcctcatttattataaaatacctcatcttttccataaataatgcaatgtctagacttttacgctgtttacacatgctcctttgaccatctattgacacacaaggaaaaatagagtagagtcatgcaggatcttgttagatttttctcgatatatactttcaaaagatcaatttttttataattttttttttgaggggattttttttttataattatgtacttatcaaaggtcaaagttgtgcaccgggaagcataaaactctatgtgttgcaatttacatggaaggggaggagtataataagagaaaattatggtaaaaggttcattcctggagatcatgagaaaggaagtagaaagaacaaaaaagaacaatgggagtgcttttcaatgtttgttgtacgtagcatttattcatttgctataatgttttgtgacattgtagtggacttgctgccgcatataagctaaagtcccatggcttgagtgtgacattgtttgaagctgatactagagctggaggaaaactcaaaactgttgcaaaggatggtttgatttgggatgagggggcaaatactatggtaatgtttttgattattgcaggtcttgcactttagcgcacaattaatttctggatttttttttgtactgtggtggttatggtcatcaacatgtctcacccactgtgcttgcagatagagagtgaagcggaggtcacgagtttactcgatgatcttgggcttcgtgagaagcagcagtttgtaagtctttcattatctgaatggcacatactttatttcgaaagattgtaattgccttttctttctagatggcttcatcttcatgttgctttctgattcagtttcgtggctaactttccaagtttgtctgattgctaactctgtcatagccaattgcacaaaacaaaagatacattgcgagagacggtcgtcctgtgctggtaagtttgcttgttttacttttgacctcttttaagatctttcaactctggagcctggaaacatggtgatgcaggaggcaagttctctctattttacatcctttcttctctgtatcttatgacatttgcctcttattctgtgcagataccttcgagtcccattgcacttctcaagagcaatatcctttcagcgcaatctaaggtcgttttatgttaagacatacttgatgctgagagtttattgaattcttaaccttcttcttattttttttttatttttttagcaaaaggtaagtatattgcatttaccaaaaaacagtatgtacaccaccacagcagccatgtcagaatctagaaataccaccgaaaaaatcctacacccaaccagagacagttatattatatcctactcctaagtttctgtacccaatttacatcaatattggtccatttacaagatatttttataattcacagaagcacatcagttttaattagtttaataatgacctctggatgaataaccaactcagaccatatagccttattcctggctttccggaagttgtacgccagagcagcaagcacagcaatgcaaacctgtttcttatacctccttttatgtgtcttagcccatctcttatagctagtgaagatacagtcgtgtgcacaggattgaaccccaatccaactagcgaaagcctcacaacattatgactataaatacatctgaagtataaatgctgcacctttttctcctcttgcctgcacggtatcagaacaaatcccagctttagctaacaattccctggttttcagtttattcaatgccatcatgcaagcaatgaaagaatgttttggaacattcagtttgttccaaacacagtgagagcaagggacctttcctgcagttccacttagccacttatatccctgactaatagtatgactctttgcaccgtaaattgatttcaacttaactttttcataagcagtgaattgtgtgttgttagagtgtctagctgtctaggagattgggagaaaaggagggaccaaggagatagaaacacacctttgtgtttctttgtgtatttactttttagggtgggtcacgttttctgagaaatttgggaaaaggaagaaatagtaacacactttcccatttgtataacctgtatactggagctccaatataatttgcatttttttttgagctgcaagaatatgttgacaaacagttattgcttcttcctcagctacaacttatgttggagccattcctttggagaaaacgctatgcttctaagatttctgatgagcatgctcaggaaaggtaatgtcaagacatgtgttacctcgccttaattttcgttccaggaggtgagcatgcatttagaactaaaaggcacaaagactgttggtggtcttgcctgttcaaatataatggagaggagttttcgctacatttaccctctcttgaagtggggttgaaatatagcatcaagttgaatgcttgattaagtttaaaggacttgtgtaactctttttctgtttactgtgattacatgacctggttgattaacataatggtctgtttatctgtagtgtgggtgagttttttgagcgacattttgggaaagaggtaatggtttaccatagtatttctgctttagtggtaaattgtaatgttgctgataattatacttcgctgcagtttgttgattatctaattgatccttttgtcgcgggtacaagtggaggagatcctcagtctctttctgtaagtgaacattttgtgcttcactcccaattttttggaggctggaaatagattcttttccagttgttctgtcaaaaatagatgtagctttattttgaatttgaagttcccaattgttcattttgactattactgattattgctaagagtggcattatgctattatgctcctaaaagaaaggtgaattttgacctacatatagtataatgtatcaatattggtttaattgtttgttcttttgttccttttggtgctcatcttgcgccttgttctcatcgctcgttttttcatgttgcacttgatttaaatttgctcagcttaacttgtctttttgaatttatattacttattgctatattttactaatttcgttgaaactaattttttgctgaacttttcgttttgttgaaatcatttttctgaattaacttgattttcctgaatagaattgaattttggtgatcttaccttttctgcagccttttatttctttcttgtcctttttccaatctcatttttttatatttccattgtgttgacatcttatcattaactgtgcagatgcgtcatgcatttccagaagtatggaatattgagaacaagtatggaccataagacgtttattttaatcgacatgtatgtttcttagtttatacatatattaattctgtggtaaaaaaaccgaacaagaatatctttttttttttctatcatcaaaaagggtgaatatatgtagaggaaaaagatttgaatcaagatattagcctaaagcaataataatgttagtaatagctttaataacaaattcaaaacgtacattaatgaaccgagaggccggaaaatagttaaagtgaccactaagagaagcgaaggattcatgatgggttttcaacccagtagggcaaatttgttcaatgttctttacaaatcaagcttattaccttgtgggtgtttttgctagagatgaatgatagaattttccctagttggaagtcttttttggttactttatgggagctagtgatgtaatttgtttcgccttatggcatttcctaacatgtgcttttgtgatgtattgaagctttttttttgccttaatttatgctggattttaattttgttctttgtttcatttttcttgcttttgaaaaaaatatatagatatgtatatattaggattggtcgaggattttgagggaagggaaagacctaagaaaacttggatgagggtgattgatagtgatatgagtctatttgggatcgaagaaaatattcctttggataaggtgtagtggagggttgagggagcaaatttatgcagattagcttgacttaaagtttttctttttgattatttttcatttacttgtgttttgcaaacatttactcatgaatgatgtaaacttcttcaaccaaatctctggaaaaaaataatctacatggaaaaaacattattaatgttaacttgacagagatcccatccttgtgaagcagctagcaattaggcatctaacaattgacattttaatggacaggatagaatgtctcttgatagtcaataccctctgtttcattgtatcccatagctactaatctagtttgtatctttccaaagaaccattattttgaagtttcaccttgaacacccattttgaaccaatatgtttcttgcccttggggagaggggctaattgccatgttttgatgcggatgcaaagacacttgttctacctgagcctattgacttgatcatggatactctagggtttgaactcaagggaaagaatcaagtcttggcatgtgtggtgacatggcgtggggatggagtaaagaagagtcatagttctgttaggatatgttcttgcttgctacatagaatcgtagttctgttaggattgctatgatattatatctagtagatagattttatagttaattaggataaacatgtgatgatcatgttataataggcatgtgattagaggataggattagcttaattcttatcttgttgttagtttaattcttatcctagttttatgtttatcttagtcgaagttgtagccatataaagggcgttccattcattaataatacttagttttgctttgtgttttaaacatacttcttgattattgtttgcttgtgagctaactaatcaaaccattaaagacttttcaggagttttagtgctaaacatcttaatttcaggagtgattttaagagcgtttagtgatcttgaatcaagaaatatccttgttcttgttcgactaatatcagtggttttgttcgagttcttggagttaatctcttcaagattcttattcaacttgattgttgagcttattggtttagtaatcatatcaagtggtatcagttttccagggaggagaggatagataggattctctttgatcaacaaagatccaagggctatcaacaaggttcaaacattgctgcttgttcaagacttgatctttttctaccaagatgcattctttacgtcacaaggtagtaataacaagattaagagtggtttttacatccaagaatcaatctttcacgtccaagatttcatctttcacgtctaagattcattctttaagatcaagaaagttataacaagcatagaagaacacataaccatggagtccgagatggacaagcttgccaaagctatgcaagcacttgcaaagtcgcaaactgaatcacagagtcgactcaatgagaatactaccacaatcaatgggattggtagtaacatgaataggttggaggcacgcatggatgccattgcaaccatcatacaaaagaagcttgatcggaatagtgccaacttcataggtgccaattcagaggaagagttggcagaacgtgaagaaagatcatccaagactacatacaatgatgatcgtggcttaaagttggatgactataatggagatagcaatcgagaagacttgttacagtggattcgacaacttgagaaggtatgtgattatagaggctttgatgacaagaaaagattcaggattgcctccataagactcacgaaatatgctggaatttggcttgaaagcttcaaggcacaacgagccaagaaaggtaaagaaaagttgtgtagttggacaaagttgaaagttcaagcttaaagagaagttcttgcctagtgactatgaacaaaaatagttcataagactctctactataagccaagacacgcttagtgtacatgagtacaccatggaatttgacaagctagggcttatatttgacatagaggagaaagaacaatggaagattgcaagatacatcaaaggcttgaaccgccacattgccaagaaggtggaagtatccacttatcacacctttgaggatgtgacaaagttggctaagaagtttgaagaacatgagaaggaagagaagcctaagagttcttacacgcctaagtatgatactaatgctaaggccaaggctagcttcctactcaaagtggtatgaaggacctaagaggctaagaacctcaccccacctaaagaagacacaagagttgagaagcctaaagtcgtcgttccaaaggagaaatttgaagagatgagaaagtgcttcaagtgtcaaggaaggagacacatagcaagcaattgtcctaacaaaagagtcctcaccatgagacaatacctagctttgcaagaagaggaggatgtctattagttcgtccctgatgaagagcaaacttaggggaagaagaggaggaggatgcttttgctgaggatgatgcaaggctagtaggggtcaagaggcgcaccttacatgtcgaccatacacctagcatggagcaaatggaaaaatcttttccacactagatgcaaggtaggtgactatatatgtaatggtataatagatagtggttcttgcactaatgttattgtatctgaggtagtgtcaaagctaaacttagctacaagggcacaccctaagccatacaagttgagtttgctagatgatagcactggcatgagagtaaagaaacaagctttgatttcattctctataggggttataaggatgagttatggggtgatgtattgcctatgagtgcatgtcatctcttgcttggaagaccattgcagtttgataaaaaggtcatccatgagggggactctaatgtgtactctgtgttggttggttctaagagggtatgtttgcatcccttagctcctcattcagtggcgccaaagcaaccacctaagacaccaagttactttctatcttcaagggagttcgaacaagaggtggaggaagaaggttgtgcttatgccttgattgtaagacatgctgccacaagtgtcaagactactagcaatgagaagctcgaagccttgatgaaagagtttgaggatgtctttctagaggaactacgacccttgagaggcatagaacatgctgtagaccttgtacctggcgcccctttgcctaacaagcctgcttataagtgtgatccagtggcatctagggaattgcaacgccaaattgaggacctaattgaaaagggctatttaagggagatcatgagtccatgtgttgtgccagctttactagttcctaagaaagatgacacatggaggatgtgcatagatagtagagcagtgaacaacattacagtcaagtaaaggtttcctatgcctagattggaagatatgttggataagttacatggggcatcaatcttttctaagattgatcttcgaagtggctaccaccaaatgaggatcagagaaggtgatgagtggaaaacaacattcaagaccaagcagggattgtatgagtggatggtgatgccatttgccttatgcaatgcgccaagctctttcatgagcttgatgaatgaggtacttcgtccgttccttaacaagtttgtggttgtttacatagatgatatacatatctatagccaaaatgtggaggaacacttgttgaacttgcgtagcttattcatgaagcttagagagcaccaactctatggtaagattgatggcgacgaggttgacgggggattatggcggcagtgaatcaccctctttgccggtcactgaaatacaacctgaggtatctttaaattctgtaattggattgactaacccaaaaactatgaaattgctgggaaaaattgctggatgtgaagttgtggtgatgattgaccctggggcaacccataattttttatcactagctactgttgagaaattagctattcctgtgtcggaatcggaaggatttggggtttctctaggggatggacaggcggtgaggggtagtggaatttgtagaggggtgttattgagtttaaatggtggagttgaagtggaaacagattttcagcctctgggtcttggtaattcggacgtgattttgggtgtacagtggctggagacgttggggacagtggagagcaattggaaaacacaaacaatggggtttgaaatcgagggtgtcaagttcactttgaaggtgacccatcactggcgaggtctcgaatctcactcaaagccatgatacgtaccttatgtaaagagggtggaggtttgtggcttgagttgaaccagattgagcattatcaggagaaaacaccgcattcatcagccttacctgaaattccagttttcttacagagagtccttacccaatttcagtctgtgtttgctacaccagaaggcttaccaccgataagagaacatgaacatgcaatagttcttagagaagggtgtaatccggtaggggtaataccgtaccgttatccacagttccaaaaagatgagatagagcgcctcatcaaagaaatgttggcttccggaatcatcaatccttccacgagccctttctcgagcccggtgatattagtgaagaagaaagatgggtcgtggcggttttgtgtagactatcgggccctcaataaagaaacggtccccgataagtatcccattcccgtgattgatgaattgttggatgagcttcatggggcaacacttttttcaaaactcgacttaagggccgggtatcaccagatccgggttaaggccgaagacactctcaaaacagcttttcgcactcatgaggggcattacgagtttttagtaatgccatttgggttgacaaacgcgccggcaacgtttcaatcccttatgaacgaggtcttcaaaccattcttgcgcaagtttgtcttggtatttttcgacgatatattggtctacagtagttctgccaggaacatgaggagcatttgaccttggtgttgcacaccctagcagctcataaattgtttgtgaatcagaagaaatgtgattttggcaggtcggaagtagcatatatggggcatatcatctctggtcaaggggtggctgtggatatggagaaggttcaagcgatggtggaatggccccttcctaaaaacctccgggaattacggggatttttgggccttacagggtactaccgcaaattcgtacttcactatgctcatatagccaagcctttaactgatcaactcaagagagatgcgtttgggtggtctgaggcagcaactcaagcctttgaaaagctcaagaaggcgatgatcacatcccctgttttggcaatgccggacttccaagagttgtttgtggttgagaccgacgcatccgggtatggtctgggggcagtgttaatgcaaaacaaccgacccattgccttttacagtaagttgttaggtgcccgggctcaattaaagtcgatctacgaaatggagttgatggccatctgcatggcagttcagaattggagatattatctgctgggtcgacatttcctcattcgtacagaccaacagagtttacgtcatctcactcagcagcgagaagtaagtactgccttccaacgttggatgagtaaacttatggggttcgattttgaaatacagtttaagccggggtgtgccaaccgggtagctgatgcattatcccgcaagacagtgggagaggttgaattgggtgcgctgatattaactcatggggtggactggaccgacttggagcgtgaaattgaaggcgatcctctgttgtgcaaaattaaacaagacttccacgggggtgctattactcctgtgcacttttctttggtggacaacaagctgttgttcaagggtcgatacgtgattcccagctcttcggtttttattcctaccttgctgcgagaatatcacgattctcccattggagggcattcgggggacctcaaaacatatctcaggatggctgccgactggtattggaggggcatgcgcaaggatgtggcgcggtatgtgcaacattgtagcgtgtgtcaacaacaaaaaatgtctcaacagatgccagggggggtactacaaccactccccataccttcctcggtttgggatgacttgtcaatggacttcgtggaaggcttgccatcttccaagggggtaaacaccatcctcgtggtggtcgatcgtttgtctaagtacgcccacttcctcccactacgtcatccatttactgctgtgtcggtggcaaatgtgtttgtcaaagaggtggttcgtttgcatgggtttccttcctccattgtttcagatcgggatcgaatttttatgagtgtgttttggcgggaattatttcgtttacatgacaccacactcaaacgaagtaccgcgtatcatcctcaaacggatggtcagtccgaaatcgtcaatcgagctctggagacttatttgcgttgctttgtgggggaatacccgcgctcttgggctcagtggcttgggccgaattttcatataatacttctcctcatctctctaccaaaatgaccccgtcaaggtcctttatggtagagaccctcctactgtgatacgggttaatcggggagcctcacctgttgaaagcttggaaaacatgctccaagagcgagacgcagtattagatgccttgcagattaatctgattaaagctcaacagaaaatgaagagtagtgctgatgctacaagaagagaggtgcattttaaggtgggagatcgagtgtacttaaaattacagccttaccgtcagaaatctttggcttaacgcccttatgagaagttagccgcccgtttctacggaccatttactattttacagaagattgggcaagctgcatacaagttacaacttcctgtttctagcaaggtgcatccggtgtttcatgtctcccaactgaaacaggccgttggttccattcccgtttcagccactattccagagcaattgtcttctgacttggagttagaggtggaacctgatgaactcctcgatgttcgtagtgtttctagaggccagcacacttacttggaagctctcattcagtggcagggattaccatcattcgaagctacctgggaagatgtggctgctttccatcaccattttccatccttccaccttgaggacaaggtgaaactttgggggggtggtaatgtgatgcaccaaactaccactccactactcacctattagaggcgtaagaaaaagggggtaaatcaggaatagtttacaaattctgttgaaaggaatattttgtaattatgatgtcagaggttgttagcaaaaaggcagtagagtaacaataaaaaggggaagggaggagagaagaaggtattgagatttttgtaaggaacttggcccttgggagagttgggagcctctcgaaagctcaccattatcttgtgaatattttccttcctggttatatacaagaaccttcctctgtcaatttcttttctctctaatcttatttcttattctgttttctggttgccattgtttgaagttgcttgttgtgcttgagtaaatacgtgaagtggtgaaacccatctgaattcatcacatctattccaagtggtataatacaagcttgtaatccaaatctaatgagaaatctaagttatgaagaatttcaaaagaactaagtacccttgttttggatgcccaaggatttacttgccgctcaagttaatgctcaacgtgcaagatacaacctctttagtatcccaaggtagtttccataagaattaattgagctcaaatcaagaacaatatttttatgtattaatgtgaacacttcctgaattatattagatatatggtctgaaggttggaagaaagattagcttttaattttaagtttgagatagtttttagaatcgaggaaagattagctcttaacttgtaaactaaggattgctttataagtaaaacattagttatggaactcttaaaattggttttgaacatttctagttaaaaatcccatgtaattctcccaaactagcttaaaatctcacatttcacaagctaaggagagacaaatggcgttctcttgtgaaacaatctaaaattttcattaggctactgttttcaagtatttatatgttagaagtgccgcatataggtacataaaataagtttacaaacacaagtaggaataaggaaaactaaaagagaaacttcagccatacaaaaccggctgaaatcagctactactttctactttctagcttcaaaatctgattgcaagtctcctttaagccaatcaccaatgaaaacctttcctccacatgaagtgtgctcaaatcaagagaagaaacccatcattcgcctatagctacctgggtcagatgaagatacggcaaaaaaaacgctggaaatcagtgaaccaaaataagcaccaattggatgctttctgtccttgctacattttcttctcataggactacttcaagccatacatgaataagcagttagatccagctcctagcatccatttgatcgtacaaatgagctccaaaaagataagtaaaaccaagcagccaaaacctaattaatactaatgatgaattagttgaatagctaatgacgatgaagcaacactttagtaggaatagtgttaattatgatcaatgctacttaatcttctgattaatttttggaaaaatgtcatatctaccttctgtatacacttattcataactatatcgtattattattatttttaaataactaccttttaagtaccaaaacctaagaaatcaggcacttgatggattccatccaaagatccatttggcggggcccactaactgacttttgattttttgcctttcctcttttggttaatctcaatggttcatcaataacaactcaatcttctccccatttcatcaaatcatccctaaatcagaactttttcaaattcacccaaatgaggttatggaaacctctaccaagtttattcgaccacttttagtctagctcaaagttttacacttgcttcaaaaactaagatttattaactttagaaattaggtttttatttttattttttatttaactttgtaacaatcttaaataactcaggtgctttctagagtttggctttaattgtttttcccttggttatgtgaaagaagtatgactactttctccaagactaaagtagagagcaaaaaatgcaattctggaatttcttgcaaaagaaaaggaacgagttaatgataatgaaaaacaaagaaaatgatgagaagagaggagctgaatcaatcatgatcatgtattttaaagttttttttgctattgaagtgacttaagaagaggaaagaggatgagtgaagacaaacaaaagaaaggataaatagagggaaatcttgggcttagaaaggtgaaaaggtaagaagatgagttagtgggccccaacaaatgtatctttggatataatccgtcatgccactgtttggggcttgcttaagtccatacattacttcactaattttacaaaatttattttcttgaccaagaactgaaaaaaccttcagtggtgatctattaggttttggaagttaaaaggtagttatttaaatgtttttaatataaaaggtagttatttagatatttttaatataaaaggtagttatgtgaataaaagtgtatataaaatgtaattttttgacatttttgccttagtttttcttgctaattcaccttttcaacttgaccaagttgctatgaggagaaaacgagcaattattaagcaaatcgcaacactagcattaatccatggcccatgaaactctccataattagagattggattagcacttagtagaacttcttgctcctgctccaggtttccattacttctttatctaagtgcatcaaaaggttgttgggttatgaaaggtggtggttgtgtatagtcattgtcaaaatgttgttaatgcactctatttagaggatgagggattgaatagttttcacctcgtgacctttcattcctttttaaaaaaattgataatgtgtattggtcctatgactgtatgaatggtaataagctatctcatgagctgttactatcttcctcagagtctaggtagaagggtttgggctgataattttctactatgtgcaattagtttgttggatttggatatgctagttgatataggtcctttcccttgggccttctcttaatataggcctacagtgtgattgaagataaatcttctggagaatataagaacaatgagatggattggttagaggttgatttgttcttttggtgtaagactatttcgggttctctattggttatgttcagacgccagaatatgtgttggtgattgttttccatgaacatactttatccgcagagacatttttcttttttcttcctataagattatatttgtttcctctcttggtgctcatctcagtgtctctactttacgttaaactgttgacattacttgacaatgcgtatatttgtcgcatggtgctcttccctcactccacgtcgaccccatacatcaaaaaatgccattaaagaatattcgaactcacaaccttgtgttgaaagaatggaatccctaccaatgactcattaattcattttctctttaagaaataaatgatttcctcacaaacttttaggctttaagagcccaaaagataaaaacataaaataagatagacatcaacgtcaagattagccttaaatgcacaaagcacatgtcaaatgattgataactactcacgagttgcaactctttgggcgttgcctaatattaattggatctcttttaaaaattgttggtggttatggttggtggagaggaccatgtaacttttagctggtcacaactggtaatgattgtcacttttactgcccataaaaaaatttaaactgttgaatatgtttctggcagtggatctgacaaatcctttacaagttggcgtccattttgttttgccatgtgactcaattataatacgtgagttttattatccaccaggtttggctcactaatttccggattaattcaatctaaactgtctccaaagaaggaaaagggtggaggaggaaagccttcttctaatgaaaagacacgcatacgtggttcgttttctttccagggtggaatgcaggtattagcatgtagctttcattctgttaacatttgtggttcttccagacatacatccaatgctttttttttttcttgctataaccataaacattcttgtcatgaacattctttaatactgttgctgagcttagtgtattcgttcattcatgtaatttcctctcttgaggttaaaatggcatacagccttacaacctatatccataatgctccttagagtagaatccctaggttataacatagtaccacttatcaaaataaacatggcacacactgcaggacaagaagtaaatccacctagagaactgagcacctagtagtaaaagcagcgatacattactaataacagtagcagggccataagagtagtaaatgggcctcatttcaacactccccccgtaatggtgagagagaagaagcagtctgaactcccagcttggagagcaaaatagagtgttgctgaacagggagaaccttagtgaaaacatctggcacttgatcttgagatggaacataggtaggctgaataaccccttcttcatttgtattgtccctcaggaaatgacaatctatgtctacatgcttggttttctcatgatgaactagatatgctgctatggcaagagcagcttggttatcacagtagataggagtagcactggactttttaatgcgaagatctttgaggagttgtttgatccacatcacctcacacacagcaagagccatggatctgtactctgcactgaccacaagaaattgcctctttgactttcaagatacggggggagtcaccaaggagcacacaaaaccagatgtagaatttacaacacccatcccattcactatcacaaaatgctgttagttgagcactagacttgttcgccatgagaattcaccctgttggcagcttgaagatgcacattagtggggcagtgcataaatttgcttaaatcatgtatagtgaaggcaatatcaggcattgccttgtaatagtgagataaatgagcttccccatcaatttttgatacacatcaggttgttgaagaggatcaccattgtcagcatagagcttgacatgtgagtccatacgaagcctcaatcgtctgcaatttataaaaccatattcatcaacaagacccatcacatacttctttagagataaaaacgatacttcactacactgatccacttcaatcctcaaaaaatatcttaggccacccatatctttcatgtgaaattggccagcgaagaaactctttgcttcctcaatagttgctaaactattgccagcaagaatgaggtcgtccacatacaccaatatagcactgaaacagtgagagttttgcttgaagaatagagagtagtcacacttggattaagtgaatacattttgctttaaagcagtgttagcttggcaaaccattgcctcaaagcctacttcaagccataaagtgacttaagcagcttgcacaccttagttcatttggtgtcacttctgccatcagtacttagctccccctctccttgaactttgatcctgttacatgtttcactatatcctggtgatagcttcatgtatacactatcctacaattcaccatgcaaaaaagcatttttaacatccatttgtttgcaagaaccaaccctctaaggatgcaacaacaagcatgtggtcatctttgctacaggggtaaaagtctgctcataatctattccatatctctgtctgtcacccatgattacaagccttggcttatgcctattatttgtgccatcagtgctgtattttgttctgatccatccatgtgagggatggctcatttctacaaaatcctagttccgttaggatttgtgttgttttcctaattctagtaggaataggactcctaaaatcctaatcctcctagttctgttaggagtttaaaagttttagtttgattgtaattctagttgtgttagaaatccaaatcctagattcatgtcacgtatggttagaacatggctagtaggataatttgtcttgtgatgtccatagccttggcatttgtggcacctaactttcaatagcttgtcttctgtctccttttctttctccttctttgaggaatcaacgtttttagagctatctaaaccactagcatcaatattaggtttaaaagtgctaaaagatttcgaatagttcttacttgcatacaatttctttttctagtttatgtagcgtcaccagggaacaaaaactcggccgttccgttctggaacggccgctttgtaacggatttcagagaggccgttccgttaaataccgttctagaacggtgatttggaattcacaccaaactcggcgcgatagcgttacgtaacggtgtaacggcgttccagaaccgttacaatcacataacgtccgttatttgaagaagaccagttcttttggtggaggaagaagaagagccaacgcaagatctatagatctgagttaaaatttgaaaataaaacatgtttttttatttaaattaaagcttacagaggatgtagaactcaaattcgagtaaacccctcctttaatttcattaggttactgcaaatcgaaccctaaattgcaaaccctaatttcgaaaaaaccctaatatgcattgggatgcaacgctgcttctccggtcatggcagagaaggtcgacgagtcatcttcggctgcttttagcactgtagctgccggtggttggcttgtttgcaggttagtgcttgctggttttctttctctcataccgatcatcttcttcttttctctcttctctttttcttttttattgtgtgactgccagtcacgtgataattgcaactcataaagtatctctttctctctcttcttttcatccctttttatttttctttcccttttagtttttattccctcacgtggaatcacctaattttcatccttttttatttttttagttacactcttacacagaagtatgttcaaatatcattatagtacctcaaatattgtatttataagagttttggacataatatgatatagaaagtaaaatagaagaaaaataaagtttaaatgtcacttgtgtgatttttttaaaaaaattcacgccgcgacggccgcgaaacgttctatttcccgttacaagccgttcccgcgataacgcgaccgttcccgcgaacgcgaccgcgaccgcgttttttttccttgagcgtcacatcttgcaagcttcttcaaaggtgagttatgtgtacaactccaatttctctccaatcccctccgtcctcatttaggcctccaaggaagctacttaaacattgatcttcaagttcatcaattttccaaagaatggataacttctcgaactcctttatgtaatcttcaacggacatattcccttgtttaagagtagaccattccatgtacaagctttgtttgtagttagaaggaacaaaacgtcctcttaacaactttttaagcttatcccaagtagagattttgggtttattagctttcacacgctgcctctttactccatccaaccaaatagatgcatatttggttaccttaagcacggccaccttgtatttcttttcttttggtgtctcttaatcccaagtagagcttttgcgtgtgaaagctaataaacacaaaatctctacttgggataatcttcttcttgtttccgaaacaactaattcttatggtagttaggaaagcaagaatggtttctaattcaatagggaatatattaattattattagtttaagttaaatagtgcacgaatctaaatagattattcgtctcaaaatctcacttaagtatagatttgtttggacatctgagggaagaagaagagagcgagataaaggagaattatcactcaatgaatccatatcccgagttttcccatttacttctttgaaagcaatatagttcacgaggtcttattatcagtctatggacataagagtaataatttaagggcaaaaactatgactttatgggtttaaactgatacatgttctgttaaactgatagatgttctgtgttaaaccgatactcatatattcctggttaaactgatagatatatgatttaaattgatacccgtctcagtcatgtcttggattgagacggtctgacacaagactttttgtgtattatatatctgattagaataaatttatcctgtttactaattattttatcttctccagacacttgttgacacaatatgcaatcagtttggtaaagatgaactcaaactacagtgcaaggtcctttcattgtcctacagtcataaggggatcccttcttcagaaaattgggtcgtgtcttctgtgtcaaaaaattccattgaagatcaacaatatgatgctgtcatcgttaccgtgagttttactttgcttactgctattgcaccaatctttcttcttttgacacactgataatggcaatgctgttgtggtttgaagccatgttatggggttttagggatatttatggagtctgatctaatatgttattggataaaattcagatctgtaacgtgactcaatgagattgaaaaaaattgaatcaagataatggattggaaaattaggagctaacctagggtctataagcgatccacttggagtctcataccaagcaggtattcgacattttaggtttatattgctgctatggctcatatgggagcctacatagggtctggtgcttattcctttttcttttgtctagttttggggctgcacatttctgttgtgttttgatatggatagccatcacctgcaattgcatggaggctgaactaagttctataggggagcaaacagtatctgttggaaatttattttcatattgtgtttttaaatgctataatccaaaatttgttgttcccctaaaatgcctaaaatacccttatgtaactgctccatctgtcccttaatagacttcccatttctccaatgcatgtttgccaatacacattttgtattgttaatatcaaaaattacatattagtaaaaattataaaagtttgattttcctaatgtacgcaatgagacgaatcaaacaagacgccatatgactatgttttttcttatacttcctatgttttttaataagtgacatgttttccttttagggaaatgtcacaataagtgacacatagctcaaagtagtaaaaatacttctcatttattacatctttgccattatttaattgtttcacctacctactttatccaatactcaaatttgattggttgaacaattggtcccaactttctctagactccttggtattccctttcccccactttctctctgtgtcacttattaaaaaatggaggacgtatattggaaaaaaattggaaggttttcttcacttatgaatagtggtaaaattagagatgggaaggctattttgggatggatggagtaatatttaaatttttaaaataatgtcattgttttagtgatgaaataaaattcaaggctattttttctagtaattatgttatctgtacatcaccacacgtatcgcgtgcatataagactagtttgatgatattccaacactgttcgaaggaagtcaggcatggaaccatgtttgcttccatatgggaaatattttgcttactctccttcaaacatctacctcattatcccagaatgattgatcgaatctaatacaaatatacaattgatcatatgccaccagggaattacatcaaattaaatttttatagaaggggaatcagtcatagcctcatagggaacgaataagtgatactcgccagtttctttcctggttacttttcctcttctcactagccatcctttatgtatgggtatgctgcatcattcctgccactggttgggactcccgtttgaactatggggggatgggaaagctaagccatcatcttcaaattgagtttcttgagaatgtaagacaccatctgtaagatgaatatagtgcactctatagtcaatgtcatgatctttatgggtttatctgctgaaataactgtgatatacccagctctccatttacaaagttttcctacatattaaactcttgcccgcaattctagaacttcattgtagaacttttcctacataagcatcatttgtcttttctgtagtaaaagttagaaagagctttattttagaacattcgtttttagttttctttgttgttgattactccgccacttttaatacttttatgattcaagtatttgacaaaatcatgtaatttaggtcctctgctgcatgcagtctataccctctctctctctctctctctctctctctctgtggttgtgtcttacttgttgagttactaactccagccattacataaagtaggctggcattatgatgagcaaattactcaagaccacatgttagctcctttttcttttctccttattctgaaaggcaaatataggtccatcttggtgcttctcatgtcataagtaagctgaccccctccttttccagggaataggacaataatccaaaagtgagggttttacatgttgggatttgtgaagtttcttattttacttaatagccgagtcagtgttacaatacatagtaccgtgttacaaaatagtatgtaacaccaagcatgtttatgtgcaaaattgtgcaagactttgttgctggcacgccaagggctgttttaatgtagtttacttattcttttaggtttttcagatgacaatcataaagggaattaggagtgtttttattgtagtcaatccctattgtgctacaacgataaaagaaaaaagcacaagactagaaggagaagtaatgtctaggaaagactcctcacctggggttgctagtcacctacacatcttagaaggcatcaaaccaaagcttattcccctcgactgttttcgggagaaaagaagacaaaattgtttctaacttatactttaccagtttcactacagcatcagaaagaagcaaaatatgctcccacaacacggcgaacctagctttccagatgtgataaaccagaccagcaaaatgattattttcactagagctttgagtctattttttcggtttttccccttcttcctggtaatgtcacgccaccaagccatcatctcaattttttgagatttgacgtaatcgctcaaatagctgagtaagacacttcttgctctaaatactaataaaaaagaggtgaatgtgggtctcagccatgttactcaaatcggataaagtgtctactcttattagggtttttgggtgttggactcatccatttttttttgtaaaatgtcaagattttggtttgaaatgagagattcaagtgtcgtgacatgagtcggcacgcaacacttaaacgtgtcgaagtaacagagggtctcagacaatcaactttaatcaatcacgaaccccaaaatttatgcaacctttgctcatattcagtctctgtaaagcactcaactgcagcacacccacccattcgcttcacctacagcaggagggcacccaagtaattgctatgatgagcgaattattctgttttgccttgctggaatattgctgttagatttgctgactcactggcagttaattatagtcagagaatgagaaatatcctgtagagagagaaagggtatcttttgtatttagctctataaatagctaaggaagggaagggcattgagagtttatgatattataataggagagatttagcctctcgaatgctgataggagcgtagctcttgttggattatcaatactactctgtttgctctatctatttctactcaggttccttcttgtacagtggatccctgattggatttacttcatcaaccagcagataaaattatttgtaggcacattgaaaccattccaaacctaatgaggccaaagtttatcacaaagaatataggagccaaatgtaggcaacagataagagtataattgccagaagttgaagactccaggtattgttcagaaaccttaatgcatatcatcattctgacactagattttccccggagccaactaacaaaaatgaattaaagagattaaggctatgtttagttcacctgaaattttctgatctgaacttatctgatctgatctgaacttattttttctgatctgatctgatctgatctgaaccaatctgattacaagatcttatcttttagatttttctcaatatataagaaaaaatatagtcatgtggggtcttgtttgattcgtctcaatgagtactttattaatattcaattattataatttttactaatatgtaatgaaagatataatgatttttaaatataagcatgatctgaactgatctgatgtgaacttattttttctgatctgatctgatctgattagatctgaaataagcaaaaataaggtgaactgaacatagcctaagcaacaattgagggaaaataagatcattatggctaagataagataaatatgtaatgataaaatcagagtaattatatcagttacactctcaacattcgtcagattgaggtttcctcccaaaatgccaacccacttttctgtattttcacgtccttctctctacccttctaggtatatattacatcagctgtaaaatttttgaaccaactagtagaatactgatctaccctcaactgcctcactttctcattttttctgggcctttttctctctagcacaagtccacataagtgatgcatagcagaaatataattccactagtcatcctcaatattgatataacaaacacatcacccacatattatcatttttaatcgctgcatgcgaggcatacttacccaccaatcaggatatgcataacagcgttcctaattccaaaaccaccatatatcttgggtttgcaactctcatccctagcaacaaggggactttctgaaaaagtggcagattccgcccacaagtagtttgtacggacacctttattatattattaatatcatatttcggcaacacaaattaccagcccagtaaaacatgaattgacatgagactaacaaggggcccaatctaatatcgtacgtctgtactaagcaatgtataaaaaaaagctcaaggtgcattgatgcaatagggatcctaatgtgcataggtgcgcctcattgaagtgaggcaccactaaggataaataaaaaagattgatgtaaaattaaattgtgcaccttgggtgcgcctcgatgaactttttttgtgtgcctaagtgtacctcaagtacgcctcattgatatcgcctcgcctggcagaaaacgagcttgaccccaatcgccttgctccccaccgcctaggcgtgcctcagtcacactttttaaatacattggtattaagtactcagaatggcaaaaagaaactttgggcattaattagacatttcactttttgtgcaactatttgtgacttcagagattgatatgttttctacattacagacttttgtgatggctgcatggtctccactgtcaaagaacattagtttaagtagaagaaatattgctctattaccttcctccctctacaaacaaaatcctaaaatgtggttatgtagtgccaattcaaacttgtagatgcatgactaatgctttcattatgctgtgggtttttatactatgattcatgtccaattacataacaattagctggagtcaggatatgtcacggaaattttaagcctggcaggatgattgtttatattttctctttttcggtgtttaagtcaaagtaaacttctaggctgctcttttataggctagttgggctgttggggagatctacacattaagtgtgaagaaatcttgtctaactccagtttggttgagaactgtaagctgtcataacatttgttgcatgatgaggccttgtgggattatcatgttagctgtaaactctaaacttacttgaaatctagtgttgtgtctccttatttctgtagtcaaaattgaaccttctgtacgtttttgatacctgcgactagaatgatggaattctgaattactgatactattacaaccatctgctaagaacgaagatgactcttagctaatttctcagcagatttagagaaattaagaagaattactaatgaatatttaaagagaaaactaccaagatatgattgtattgatgaaaaacaccaattacaacctaaccaacattcgagaggttggagctctcccaagtaaccatttctctcactaaacttatcaattttcaagatgccttttccattctcagttcctctatatttatactactccccttagcaaactacccaacttattccccaagtaaactaaagagataatatctaaaatacccttccccctacaataatattagttcttagcattaccggccccctaaacttccaccttgtcctcaaggtgggtcgtaatcatcactaaattctgggcctctactcgtatattcagtgtcttgcagcccttcaggccccaagcctaggttatgcagctcgtgttgcggctcctcctcatatagttctctggctggagtgagtgcctcaactataatgaaaaagtcctggaggtggggaaggaaggagtgtctgaaatggtgtggtgtgctgctggtgttatgggcttgtgcctgaaagttttgggtttaaagagatggagtggagaagagtggagaagtgactggagacgtaaaagaaggaatcataatttttgtaagtggtgggttgaaaaagttggtgggaagaattgtttttataaaatgtagtgtaatggtcgaaaaatgggtggagtaagtatggtttttggctggggatgtggtactgggttgaaaataaataggtctgagcttacttgtaaaattggcctcaacatgagcaggcccaatatcttgagccaattccccaaaagctggcaatagagcactcttaattgcattgttgtgggccatcgggctccaaacatatattcggaggagccggacttctttggtgatgtcattagcttggcccattgcacactttcccttaacagcctcaagatcttttcccacttttgtaccccaaccacgtggcttcaccatcctttctttcttgcttttgtcacttttttggcaatatacgagtttgtccttactaccctcatcttctaatgttggcttcctcaccaagcttaatttctggaattttgtccaccaaatcccaccacccatcgtcaacaccatacctatctacaccggccaagaagcctggtcctccacccgaattttcgccacagacaaagcctgaacaaccgtcagttctctcaccggagaagttcacaggtccaccacctgacccactagttgctgatccacccttcacaaatctccctcctctggctgccacaagtagtggttcctccgtaatactcatatttctcgtccaagagccctggaccaccaccggacccacttccaccggcaccaacttgttcaaatgatacttctctttcttttccaaacagcctacttggactggaaaaaccactgcgattgtagcctccgccagatctgtagcctagtgcacctaacgtgcttccaactgcaacccaatagggatggaaatggatgggattcggggagggtggagcatcacccgcatccgtcacccgcatccattcgctccacccgctccacccgcatccatccatccgtcacccacgggtgaaacgggtgggtcggtgataaacgggtggaaccatttagggggtgtttggtatcatgtttttttacaaaagaaacagaatcaagtaacaaaatccgtttctacttgtttggttctatgttgctcagactcgagtacccatgtccgacacgggtacgtgtccaagtgtccaactcagctattttctagaattttttatattttttaacccaaaacaaagtgtccaagtgtcccacccatgtccgactcccgaggatccgacacgggtacttgaggtgaaatgaagagtccgagcaacggaggtttggttagtgtgtaaagtaacaattaccgttacttgaggaaaacacatccccccaagttgtttccattcaaaaacctaaggaaacaaataacgtttcactcctcaaacaagaggaaagggaatgggttatatttatttccattccattaggataccaaacaactaataagggtaacacttattattatcctttcccctccttatcaaaatcctttccattccgtttacggtattcataccaaacacccccttagtatattttctaatgaaatttgtgatatgatatgcatgatataaaataattctatcaaaaatataaaaagtaagtaaacttacatgtacaacttaatagatgggtgatgggttggaggttaaacgagtgatggatcgggtgacgggtgaagaaattctcacccaccactcgctttccatccatttaaattaggtttttcatccatttaaaaaaccgggttaaacaggtgatgtatgatccatcacccatttccatcctcaaacacatcccgatttgtttactgcaccaccagatccaccagtataaccacccgaaaaatcatcatgccttctactagccttgtaacctgctcccggtgagaagcttcttccacaagtggtggtcgctggacctccatctccttcttccccaaaaaattttccatgacacccactcgacccttcatctgtgacaacctcttcttcgtccacctctgaagttttggggtcgtcttcctcctcaagctcctcttgaagtaactttaacttccgttggatgggagagaacgcttcattgattatcttcaccagatcttcttgaagtttctcgaaactttttctcacgttttcctctacctctttcgtgatttcctttccgatctccttcatttttagactaggagctcttgcgattccatggcagatttctttttttaaaacaagaaaatcaggcacttaatctcccagaatagtggtgctctgataccattttctaagaaccaagatgactcttagctaatttctcagcataacaacaaatttagagaaattaagaagaattactaatgaatatttaaagagaaaactactaagatatgattgtattgatgaaaaacaccgattacaacctaaccaagaggttggagctctcccaagtaaccatttctctcactaaacttatcaattttcaagatgccgtttactactccccttagcaaactacccaacttattccccaataaactaaagagataatatctaaaatacccttccccctacaatattagttcttagcaccatcaaactgggatggatggttttgtaaggttccaatttacttctccatcaaaatattttaggattttttatctcatgtattttagagtttcctcgtccctttttatctgataagattcttctgatgatttgattttatggtaggctccaatcagcaatattaaagaactgaagattctgaaagctggagttccattttcacttgacttcattccagaggtttgtatttttatagtggttagacatgcttcccctagttttcaaagtaaaagcatccttgttgtgacgatattttttcccttgtttttgtttttattattatcatcacttatttccattttctattttccatgctgataagatgttcatcaccataatcttgtggtatcagaagtgtttagtggagtttattcactacacatgcagttgttcttttgccatgaccgccattcattttctcgtcaaaacaaatctatgaagtttggttttcagactcatggttcttgtagctcttgtgaatttttttttcttctccttgcatgcattcttcaaattacatattgcatataccaggtgctctcctttattttatatttaatttttaaaattctatcatatattttttaatgtcaaacctcaaactaggggttcactgcatcttaggcttaccaggctaatatttctttacttaaccttttccctttatatttgctatcctcttgtgtagtaatcaccataagaagggtacaaactaaattaccctcccattcttttgtatcattctgaaatagtgtcacagagctttgatttttttgccctcatttaatctggcaaatgttctctctatttttttttttttactttcttttgacgggattctcaggcaattgttacggggagcagccagtcacactgtttctgtttattatgcaggtgagttacctgcccctctctgttatgattactgcgtttaagaagaccagcgttacaagacctcttgagggcttcggagttcttatcccttcgaatgagcaacataatggactgaagactctcggtaattgtctggttcacgtgtgtagcgaatcagattttcaaaccctgatttcgtaacattgcaggtactctgttttcatctatgatgtttccagatcgtgctttctccgatatgtatctctatactaccttrgttggaggaagcagaaatagagaacttgcaaaagcttcaacgtatgagatatgcaatgttttaaatgtatgctatagtcatcgtttcaaccttttggtgcctttttcttactaatttatcctcctggtttaatgatcttagggatgaattggagcaaatagtttcgtctgatctccaccagctgttgggcactgagggaaaacctacttttgtgaagtattgatatctttcacccaacttaacatgatttgtgcttataatatgttaaataaagtaactgaaatcctgaaattaagactacgaaactgtatggtgacagtcatttttactggaacaatgcattccctttatatgggcacaattacgactcagttctgagagcaatagaaaagatggaaagagatcttcctggacttttttacgcaggtaatctgtcatttgcttgttgcgataaagttcatgtacagttggcatatcaatcaacttgcattctttcttgctaactccaaacaatcaggatcattaacttgtaggctgcagcaacagagagtatctcccaagttgttaggtttcatgtaacctcgtcgctgagatgaaatttccgttggctaaaaagtgaaagttttgtattgatgttacccaaaacaaaagtattttgcatgttgcttgaagttttggttgtttcagatagtacatcctttgacatgaaaataaatggaaaagcgtatgtcaagcaattatcatctagtttctttgtttctagatactagccgcatttgatcccagatcatttttgaggaagtcagctgaaataccgtagctatccttcagttttcataataaaactttaatggatctgatgtacagtaatttagtgtgcaccgggttaataattgatattaacttcatatagtgagtcttataaagatataatgaacttatatacaatatagtggattttattaatggaaaacatatagtgaaactatatgcaatatagtatgatacataaagacttagacaacaagagcattcgaaattacaaagaacaaaggaaagaacaattgtatcaaaccggttcgaatgaacaaacaaccaccacttccacaatcaatgtaccaccaatcaagactaaactataacaatgagcttctagtttaagtctactttgagttttaatcaccaattcaacgattagatgatcaaaattgcaaaggttaagagttggtcaaacctaaccaagagttacactaggcacatagctttgttaggagtatattagtttatgaattctagttaagttagaaatccaatacctagttggattaggattcctaattggattagaattatagtttagttagaattctagtaatagtaggcgtgtgattaggagatataattagcttaattcttatattgttagtttaattcttatcctcgttttaggtttatctttagtcgaacttgtaccctatataaggggcctttatttcattaataatatagtttattttgagtttaaacctttacttgtgattgtttgcttgagaggttattaatcgaaccattaataacttttcaggattgttaagtttttagtgttaaacatcttaatttcaggagtgattttaagagtgtttagattcttgtattcaagtttcaggactgatcttgaatcaagaaatatccctagtttcgactaatatcataagtagttcgaattcttggagtcttttcttcaagattcatattcataacttgattatttagacttcttggttttgtaatcatatcaagtggtatcagttttccagggaggagaggatacaaagggttctctttgatcaaagaagatccaagggcatcaataagaatgacacttgcaataagttcgagtgatacaaacaacttcaagactcgatcttttgctaccaagaaccaatcttgacgcctgaagattgttaggacaaaggataagaagtgtttctacatccaagattgcattctttacgtccaagattgcgtcaagatccattctttaagttcaagaaaggagtagaaagcattcgaacactacttaaacatgacatccgagatggataagctggctatggccatgagtgccttggcacaatcacaaactgagtcacgcaaccacatgggtaggatggaggcacgtgaccgtggattgaaactagatgactatagtggagatggcaatccagaagacttgttggagtggatttgccaactaggcaaagtgagtgattataggggctttgatcacaagaagagattcaaggttgcttccattaggctcacgaagtatgctggaatacggctcgaaggattgcatgcacaaacttcttgcctaatgactatgaacaaaaacagttcataaggctcgcatcaataagccaaaacacacttagtgtacacgaatacagcatggagtttgacaaattagggcttatatgtgacatagaagagaaagagcaatacaagattgcaatgtacattaaagggttgaatcgatatatagccaagaagatcgaagtctcaacttatcacttctttgaggatgtgactaaattggctaagaaattcgaagagcatgacaaagaagaagggcctaagagttcttacacacctaagtatgactctagtgctaaagggaaatcaacagttccctactcaaggtggtcggaaagacctaagaaccccactacacctaaggaggacactagcatggagaagacaaaagtggccgtacctaaggagagtttaattttgtgttttatacatctttgcttaagagcttaacaattgaaactattaataacttttcaggatggttaagtttttagtgttaaacatcttaatttcaggagtgattttaagagtatttagattcttgtattcaagtttcaggagtgatcttgaatcaagaaatatccccttgttcaactattataattgatcttattcgagttcttggagttaatttcttcaagattcatattcatacttgattattagacttcttggtttagtaatcatatcaatatcattagcattaatttacccccagggagattaagaaaggattagcctaatcaaggcgcttaagaagtttttaggaaaaatcgtgcttgttaagcttaagaattgaacttctttcaccatttgcccttgattctcttgttgaactagaagatcttggttcatagtagatgctcctgcatcatagtagagcatttaattttaattttttaacatgcacgaagatgtaggtagtgtagtatatatcgtgagacgtggtttaacatatagaaagatgtagtttctgcatgatatagtgagtttttgcatgatatagtgaatgtctgaatgatacagtggatcgttccgaattgttgtagtttgtatgatatagtatttttgtgaatgatatagtgagtttcttcatgatacaatgggtttctgaatgatatagtggattgcttagaaatgatatagtgagcttttgtatcatgtagtaggtttctatgtgatataggttgttaaaagatgatacatgcttttggcctcatgtactctaatgttaacgtgaacccggtccttgcaagtcaattgcagttttttcaatattaagctatttttttttttttttttttttttttttttttttttttgtacgggaatatttagcatctttaccacaaacataaccatacgaatattatgcggaaattccagtctgaagtcttaacttttcaaaattaaaagcttctatattatttttggaatgaaaaaaaatgagctatggcatgttattttgaaatacaatgagtctcaaggtgcatagtggcttcaattctacgaataatgaatggactactgatttctaattttttgttccgggcttttgcattaggtaaccataaagatggactctctgtgggaagaactatttcctctggatacaaagctgcggagcttgtgatatcctatctcaactctacttaagatgcctaaatgatcgaggagactccgtaagtcctttctctgattctatctttgaactgagtggaaacacgactgtggtctaaagtagttgatgtctcagatatccagaaatggcgttagtgatattcaggagctgtccattgaccctttgattcattgttgcagtttactgaaagttgttagctggtctcagaaaaacgaaaggaaaaaagggggaaaacaaaaacaaagaaacgtagattgtggtgttaaaatcaagaattccagagatttgtaccttctttatcagttgaattgtttacagtgtgaatcaagaagttagctcgaccttcttttcttgtgaatggtaagatttcgtgatcatcaatacttgattgtgctgtttgcaacttcaacggtaagatttcctgatcttacagtttaattgcttgtgctgtttgccactt

SEQ ID NO: 47 - DNA, 1575 bp, synthetic construct
  misc_feature 1..1575: note = F420L mutated Beta vulgaris PPO2
  source 1..1575: mol_type = other DNA
atggtaatgctatacgattctcacctctcaggagtctcaactcatcttcaactatcgcaggcatttcccaggaagaacccattaatggccaaagtgtctgagccgggtaaacccacttctgctaaaaggattgctgttgttggtgctggtgttagtggacttgctgccgcatataagctaaagtcccatggcttgagtgtgacattgtttgaagctgatactagagctggaggaaaactcaaaactgttgcaaaggatggtttgatttgggatgagggggcaaatactatgatagagagtgaagcggaggtcacgagtttactcgatgatcttgggcttcgtgagaagcagcagtttccaattgcacaaaacaaaagatacattgcgagagacggtcgtcctgtgctgataccttcgagtcccattgcacttctcaagagcaatatcctttcagcgcaatctaagctacaacttatgttggagccattcctttggagaaaacgctatgcttctaagatttctgatgagcatgctcaggaaagtgtgggtgagttttttgagcgacattttgggaaagagtttgttgattatctaattgatccttttgtcgcgggtacaagtggaggagatcctcagtctctttctatgcgtcatgcatttccagaagtatggaatattgagaacaagtttggctcactaatttccggattaattcaatctaaactgtctccaaagaaggaaaagggtggaggaggaaagccttcttctaatgaaaagacacgcatacgtggttcgttttctttccagggtggaatgcagacacttgttgacacaatatgcaatcagtttggtaaagatgaactcaaactacagtgcaaggtcctttcattgtcctacagtcataaggggatcccttcttcagaaaattgggtcgtgtcttctgtgtcaaaaaattccattgaagatcaacaatatgatgctgtcatcgttaccgctccaatcagcaatattaaagaactgaagattctgaaagctggagttccattttcacttgacttcattccagaggtgagttacctgcccctctctgttatgattactgcgtttaagaagaccagcgttacaagacctcttgagggcttcggagttcttatcccttcgaatgagcaacataatggactgaagactctcggtactctgttttcatctatgatgtttccagatcgtgctttctccgatatgtatctctatactaccttrgttggaggaagcagaaatagagaacttgcaaaagcttcaacggatgaattggagcaaatagtttcgtctgatctccaccagctgttgggcactgagggaaaacctacttttgtgaatcatttttactggaacaatgcattccctttatatgggcacaattacgactcagttctgagagcaatagaaaagatggaaagagatcttcctggacttttttacgcaggtaaccataaagatggactctctgtgggaagaactatttcctctggatacaaagctgcggagcttgtgatatcctatctcaactctacttaa

SEQ ID NO: 48 - DNA, 251 bp, synthetic construct
  misc_feature 1..251: note = Donor template for F420M
  source 1..251: mol_type = other DNA
ggaggataaattagtaagaaaaaggcaccaaaaggttgaaacgatgactatagcatacatttaaaacattgcatatctcatacgttgaagcttttgcaagttctctatttctgcttcctccaaccatggtagtatagagatacatatcggagaaagcacgatctggaaacatcatagatgaaaacagagtacctgcaatgttacgaaatcagggtttgaaaatctgattcgctacacacgtgaaccagaca

SEQ ID NO: 49 - DNA, 251 bp, synthetic construct
  misc_feature 1..251: note = Donor template for F420I
  source 1..251: mol_type = other DNA
ggaggataaattagtaagaaaaaggcaccaaaaggttgaaacgatgactatagcatacatttaaaacattgcatatctcatacgttgaagcttttgcaagttctctatttctgcttcctccaacdatggtagtatagagatacatatcggagaaagcacgatctggaaacatcatagatgaaaacagagtacctgcaatgttacgaaatcagggtttgaaaatctgattcgctacacacgtgaaccagaca

SEQ ID NO: 50 - DNA, 251 bp, synthetic construct
  misc_feature 1..251: note = Donor template for F420L
  variation 125: note = n is any nucleotide
  source 1..251: mol_type = other DNA
ggaggataaattagtaagaaaaaggcaccaaaaggttgaaacgatgactatagcatacatttaaaacattgcatatctcatacgttgaagcttttgcaagttctctatttctgcttcctccaacnagggtagtatagagatacatatcggagaaagcacgatctggaaacatcatagatgaaaacagagtacctgcaatgttacgaaatcagggtttgaaaatctgattcgctacacacgtgaaccagaca

SEQ ID NO: 51 - DNA, 262 bp, synthetic construct
  misc_feature 1..262: note = Donor template for dG209
  source 1..262: mol_type = other DNA
aaaatgaacaattgggaacttcaaattcaaaataaagctacatctatttttgacagaacaactggaaaagaatctatttccagcctccaaaaaattgggagtgaagcacaaaatgttcacttacagaaagagactgaggatctccacttgtacccgcgacaaaaggatcaattagataatcaacaaactgcagcgaagtataattatcagcaacattacaatttaccactaaagcagaaatactatggtaaaccattacctc

SEQ ID NO: 52 - DNA, 335 bp, synthetic construct
  misc_feature 1..335: note = Donor template for R126A
  variation 197: note = n is any nucleotide
  source 1..335: mol_type = other DNA
tgcaatgggactcgaaggtatctgcacagaataagaggcaaatgtcataagatacagagaagaaaggatgtaaaatagagagaacttgcctcctgcatcaccatgtttccaggctccagagttgaaagatcttaaaagaggtcaaaagtaaaacaagcaaacttaccagcacaggacgaccgtctctcgcaatgtangctttgttttgtgcaattggctatgacagagttagcaatcagacaaacttggaaagttagccacgaaactgaatcagaaagcaacatgaagatgaagccatctagaaagaaaaggcaattacaatctttcgaaataaa

SEQ ID NO: 53 - DNA, 335 bp, synthetic construct
  misc_feature 1..335: note = Donor template for R126G
  variation 197: note = n is any nucleotide
  source 1..335: mol_type = other DNA
tgcaatgggactcgaaggtatctgcacagaataagaggcaaatgtcataagatacagagaagaaaggatgtaaaatagagagaacttgcctcctgcatcaccatgtttccaggctccagagttgaaagatcttaaaagaggtcaaaagtaaaacaagcaaacttaccagcacaggacgaccgtctctcgcaatgtancctttgttttgtgcaattggctatgacagagttagcaatcagacaaacttggaaagttagccacgaaactgaatcagaaagcaacatgaagatgaagccatctagaaagaaaaggcaattacaatctttcgaaataaa

SEQ ID NO: 54 - DNA, 335 bp, synthetic construct
  misc_feature 1..335: note = Donor template for R126L
  variation 197: note = n is any nucleotide
  source 1..335: mol_type = other DNA
tgcaatgggactcgaaggtatctgcacagaataagaggcaaatgtcataagatacagagaagaaaggatgtaaaatagagagaacttgcctcctgcatcaccatgtttccaggctccagagttgaaagatcttaaaagaggtcaaaagtaaaacaagcaaacttaccagcacaggacgaccgtctctcgcaatgtanagtttgttttgtgcaattggctatgacagagttagcaatcagacaaacttggaaagttagccacgaaactgaatcagaaagcaacatgaagatgaagccatctagaaagaaaaggcaattacaatctttcgaaataaa

SEQ ID NO: 55 - DNA, 335 bp, synthetic construct
  misc_feature 1..335: note = Donor template for R126I
  source 1..335: mol_type = other DNA
tgcaatgggactcgaaggtatctgcacagaataagaggcaaatgtcataagatacagagaagaaaggatgtaaaatagagagaacttgcctcctgcatcaccatgtttccaggctccagagttgaaagatcttaaaagaggtcaaaagtaaaacaagcaaacttaccagcacaggacgaccgtctctcgcaatgtadattttgttttgtgcaattggctatgacagagttagcaatcagacaaacttggaaagttagccacgaaactgaatcagaaagcaacatgaagatgaagccatctagaaagaaaaggcaattacaatctttcgaaataaa

SEQ ID NO: 56 - DNA, 335 bp, synthetic construct
  misc_feature 1..335: note = Donor template for R126M
  source 1..335: mol_type = other DNA
tgcaatgggactcgaaggtatctgcacagaataagaggcaaatgtcataagatacagagaagaaaggatgtaaaatagagagaacttgcctcctgcatcaccatgtttccaggctccagagttgaaagatcttaaaagaggtcaaaagtaaaacaagcaaacttaccagcacaggacgaccgtctctcgcaatgtacattttgttttgtgcaattggctatgacagagttagcaatcagacaaacttggaaagttagccacgaaactgaatcagaaagcaacatgaagatgaagccatctagaaagaaaaggcaattacaatctttcgaaataaa

SEQ ID NO: 57 - DNA, 251 bp, synthetic construct
  misc_feature 1..251: note = Donor template for F420V
  variation 125: note = n is any nucleotide
  source 1..251: mol_type = other DNA
ggaggataaattagtaagaaaaaggcaccaaaaggttgaaacgatgactatagcatacatttaaaacattgcatatctcatacgttgaagcttttgcaagttctctatttctgcttcctccaacnacggtagtatagagatacatatcggagaaagcacgatctggaaacatcatagatgaaaacagagtacctgcaatgttacgaaatcagggtttgaaaatctgattcgctacacacgtgaaccagaca

SEQ ID NO: 58 - DNA, 161 bp, synthetic construct
  misc_feature 1..161: note = Donor template for R126L (for Cas9-Cpf1)
  source 1..161: mol_type = other DNA
cttcatgttgctttctgattcagtttcgtggctaactttccaagtttgtctgattgctaactctgtcatagccaattgcacaaaacaaattrtacattgcgagagacggtcgtcctgtgctggtaagtttgcttgttttacttttgacctcttttaagatc

SEQ ID NO: 59 - DNA, 161 bp, synthetic construct
  misc_feature 1..161: note = Donor template for R126L (for Cas9-Cpf1)
  variation 92: note = n is any nucleotide
  source 1..161: mol_type = other DNA
cttcatgttgctttctgattcagtttcgtggctaactttccaagtttgtctgattgctaactctgtcatagccaattgcacaaaacaaactntacattgcgagagacggtcgtcctgtgctggtaagtttgcttgttttacttttgacctcttttaagatc

SEQ ID NO: 60 - DNA, 175 bp, synthetic construct
  misc_feature 1..175: note = Donor template for G209 (for Cas9)
  source 1..175: mol_type = other DNA
gctgataattatacttcgctgcagtttgttgattatctaattgatccttttgtcgcgggtacaagtggagatcctcagtctctttctgtaagtgaacattttgtgcttcactcccaattttttggaggctggaaatagattcttttccagttgttctgtcaaaaatagatgtagc

SEQ ID NO: 61 - DNA, 155 bp, synthetic construct
  misc_feature 1..155: note = Donor template for G398A (for Cas9-Cpf1)
  variation 64: note = n is any nucleotide
  source 1..155: mol_type = other DNA
ggtagtatagagatacatatcggagaaagcacgatctggaaacatcatagatgaaaacagagtngctgcaatgttacgaaatcagggtttgaaaatctgattcgctacacacgtgaaccagacaattaccgagagtcttcagtccattatgttgc

SEQ ID NO: 62 - DNA, 200 bp, synthetic construct
  misc_feature 1..200: note = Donor template L397E and F420V (for Cas9)
  variation 165: note = n is any nucleotide
  source 1..200: mol_type = other DNA
cgaatgagcaacataatggactgaagactgarggtaattgtctggttcacgtgtgtagcgaatcagattttcaaaccctgatttcgtaacattgcaggtactctgttttcatctatgatgtttccagatcgtgctttctccgatatgtatctctatactaccgtngttggaggaagcagaaatagagaacttgcaaaagc

SEQ ID NO: 63 - DNA, 154 bp, synthetic construct
  misc_feature 1..154: note = Donor template for G209 (for Cpf1)
  source 1..154: mol_type = other DNA
ctatttccagcctccaaaaaattgggagtgaagcacaaaatgttcacttacagaaagagactgaggatctccacttgtacccgcgacaaaaggatcaattagataatcaacaaactgcagcgaagtataattatcagcaacattacaatttacc

SEQ ID NO: 64 - DNA, 200 bp, synthetic construct
  misc_feature 1..200: note = Donor template for L397E and F420V (for Cpf1)
  variation 36: note = n is any nucleotide
  source 1..200: mol_type = other DNA
gcttttgcaagttctctatttctgcttcctccaacnacggtagtatagagatacatatcggagaaagcacgatctggaaacatcatagatgaaaacagagtacctgcaatgttacgaaatcagggtttgaaaatctgattcgctacacacgtgaaccagacaattaccytcagtcttcagtccattatgttgctcattcg

SEQ ID NO: 65 - DNA, 251 bp, synthetic construct
  misc_feature 1..251: note = Donor template for F420L
  source 1..251: mol_type = other DNA
ggaggataaattagtaagaaaaaggcaccaaaaggttgaaacgatgactatagcatacatttaaaacattgcatatctcatacgttgaagcttttgcaagttctctatttctgcttcctccaacyaaggtagtatagagatacatatcggagaaagcacgatctggaaacatcatagatgaaaacagagtacctgcaatgttacgaaatcagggtttgaaaatctgattcgctacacacgtgaaccagaca

SEQ ID NO: 66 - DNA, 335 bp, synthetic construct
  misc_feature 1..335: note = Donor template for R126L
  source 1..335: mol_type = other DNA
tgcaatgggactcgaaggtatctgcacagaataagaggcaaatgtcataagatacagagaagaaaggatgtaaaatagagagaacttgcctcctgcatcaccatgtttccaggctccagagttgaaagatcttaaaagaggtcaaaagtaaaacaagcaaacttaccagcacaggacgaccgtctctcgcaatgtayaatttgttttgtgcaattggctatgacagagttagcaatcagacaaacttggaaagttagccacgaaactgaatcagaaagcaacatgaagatgaagccatctagaaagaaaaggcaattacaatctttcgaaataaa

SEQ ID NO: 67 - DNA, 20 bp, synthetic construct
  misc_feature 1..20: note = sgRNA 1 for L397E and F420V (for Cas9)
  source 1..20: mol_type = other DNA
ctctatactacctttgttgg

SEQ ID NO: 68 - DNA, 20 bp, synthetic construct
  misc_feature 1..20: note = sgRNA 2 for L397E and F420V (for Cas9)
  source 1..20: mol_type = other DNA
gaagactctcggtaattgtc

SEQ ID NO: 69 - DNA, 20 bp, synthetic construct
  misc_feature 1..20: note = sgRNA for R126L (for Cpf1)
  source 1..20: mol_type = other DNA
tgcaattggctatgacagag

SEQ ID NO: 70 - DNA, 23 bp, synthetic construct
  misc_feature 1..23: note = sgRNA1 for R126
  source 1..23: mol_type = other DNA
taactctgtcatagccaattgca

SEQ ID NO: 71 - DNA, 20 bp, synthetic construct
  misc_feature 1..20: note = sgRNA for R126L (for Cas9)
  source 1..20: mol_type = other DNA
aaaagatacattgcgagaga

SEQ ID NO: 72 - DNA, 20 bp, synthetic construct
  misc_feature 1..20: note = sgRNA for G398A (for Cpf1)
  source 1..20: mol_type = other DNA
aaaccctgatttcgtaacat

SEQ ID NO: 73 - DNA, 20 bp, synthetic construct
  misc_feature 1..20: note = sgRNA for L397E and F420V (for Cpf1)
  source 1..20: mol_type = other DNA
tccgatatgtatctctatac

SEQ ID NO: 74 - DNA, 23 bp, synthetic construct
  misc_feature 1..23: note = sgRNA2 for R126
  source 1..23: mol_type = other DNA
aactctggagcctggaaacatgg

SEQ ID NO: 75 - DNA, 23 bp, synthetic construct
  misc_feature 1..23: note = sgRNA1 for G209
  source 1..23: mol_type = other DNA
tcgcgggtacaagtggaggagat

SEQ ID NO: 76 - DNA, 23 bp, synthetic construct
  misc_feature 1..23: note = sgRNA2 for G209
  source 1..23: mol_type = other DNA
tgtaagtgaacattttgtgcttc

SEQ ID NO: 77 - DNA, 23 bp, synthetic construct
  misc_feature 1..23: note = sgRNA1 for F420
  source 1..23: mol_type = other DNA
tccgatatgtatctctatactac

SEQ ID NO: 78 - DNA, 23 bp, synthetic construct
  misc_feature 1..23: note = sgRNA2 for F420
  source 1..23: mol_type = other DNA
ttggaggaagcagaaatagagaa

SEQ ID NO: 79 - DNA, 20 bp, synthetic construct
  misc_feature 1..20: note = sgRNA for G209 (for Cas9)
  source 1..20: mol_type = other DNA
tcacttacagaaagagactg

SEQ ID NO: 80 - DNA, 20 bp, synthetic construct
  misc_feature 1..20: note = sgRNA for G398A (for Cas9)
  source 1..20: mol_type = other DNA
cctgcaatgttacgaaatca

SEQ ID NO: 81 - DNA, 44 bp, synthetic construct
  source 1..44: mol_type = other DNA
gaaggtgaccaagttcatgctacgaccgtctctcgcaatgtata

SEQ ID NO: 82 - DNA, 47 bp, synthetic construct
  source 1..47: mol_type = other DNA
gaaggtgaccaagttcatgctgtcatagccaattgcacaaaacaaat

SEQ ID NO: 83 - DNA, 43 bp, synthetic construct
  source 1..43: mol_type = other DNA
gaaggtcggagtcaacggattcgaccgtctctcgcaatgtatc

SEQ ID NO: 84 - DNA, 49 bp, synthetic construct
  source 1..49: mol_type = other DNA
gaaggtcggagtcaacggattctgtcatagccaattgcacaaaacaaaa

SEQ ID NO: 85 - DNA, 29 bp, synthetic construct
  source 1..29: mol_type = other DNA
gggcttcgtgagaagcagcagtttgtaag

SEQ ID NO: 86 - DNA, 28 bp, synthetic construct
  source 1..28: mol_type = other DNA
gcgctgaaaggatattgctcttgagaag

SEQ ID NO: 87 - DNA, 29 bp, synthetic construct
  source 1..29: mol_type = other DNA
ctctgtcatagccaattgcacaaaacaaa

SEQ ID NO: 88 - DNA, 30 bp, synthetic construct
  source 1..30: mol_type = other DNA
taattgccttttctttctagatggcttcat

SEQ ID NO: 89 - DNA, 25 bp, synthetic construct
  source 1..25: mol_type = other DNA
catgtttccaggctccagagttgaa

SEQ ID NO: 90 - DNA, 175 bp, synthetic construct
  source 1..175: mol_type = other DNA
gctgataattatacttcgctgcagtttgttgattatctaattgatccttttgtcgcgggtacaagtggagatcctcaatccctttctgtaagtgaacattttgtgcttcactcccaattttttggaggctggaaatagattcttttccagttgttctgtcaaaaatagatgtagc

SEQ ID NO: 91 - DNA, 155 bp, synthetic construct
  source 1..155: mol_type = other DNA
ggtagtatagagatacatatcggagaaagcacgatctggaaacatcatagatgaaaacagagtagctgcaatattgcggaatcagcgtttgaaaatctgattcgctacacacgtgaaccagacaattaccgagagtcttcagtccattatgttgc

SEQ ID NO: 92 - DNA, 200 bp, synthetic construct
  source 1..200: mol_type = other DNA
cgaatgagcaacataatggactgaagactgagggtaactgcctcgttcacgtgtgtagcgaatcagattttcaaaccctgatttcgtaacattgcaggtactctgttttcatctatgatgtttccagatcgtgctttctccgatatgtatctctatactaccgttgtcggcggaagcagaaatagagaacttgcaaaagc

SEQ ID NO: 93 - DNA, 161 bp, synthetic construct
  source 1..161: mol_type = other DNA
cttcatgttgctttctgattcagtttcgtggctaactttccaagtttgtctgattgctaactctgtcatagccaatcgcgcagaacaaattatacattgcgagagacggtcgtcctgtgctggtaagtttgcttgttttacttttgacctcttttaagatc

SEQ ID NO: 94 - DNA, 154 bp, synthetic construct
  source 1..154: mol_type = other DNA
ctatttccagcctccaaaaaattgggagtgaagcacaaaatgttcacttacagaaagagactgaggatctccacttgtacccgccacgaagggatcaattagataatcaacaaactgcagcgaagtataattatcagcaacattacaatttacc

SEQ ID NO: 95 - DNA, 155 bp, synthetic construct
  source 1..155: mol_type = other DNA
ggtagtatagagatacatatcggagaaagcacgatctggaaacatcatagatgaaaacagagtagctgcaatgttacgaaatcaaggattgagaatctgattcgctacacacgtgaaccagacaattaccgagagtcttcagtccattatgttgc

SEQ ID NO: 96 - DNA, 191 bp, synthetic construct
  source 1..191: mol_type = other DNA
ggcaccaaaaggttgaaacgatgactatagcatacatttaaaacattgcatatctcatacgttgaagcttttgcaagttctctatttctgcttcctccaacaacggtagtatagagatacatgtctgacaatgcacgatctggaaacatcatagatgaaaacagagtacctgcaatgttacgaaatcaggg

SEQ ID NO: 97 - DNA, 37006 bp, synthetic construct
  source 1..37006: mol_type = other DNA
tattccatcgaatgtagcaaattgactgtccgttgcaatttcggagtttccactcgtcgcatggtaaatggtaatgctatacgattctcacctctcaggagtctcaactcatcttcaactatcgcaggcatttcccaggaagaacccattaatggccaaagtgtctgagccgggtaaacccagtaagtcaaacattcgaatcacaactcaagcaaatttgtcttgtttgcgttatattttgctcatttcagccttttttgtttttccgacctttgcatactgaatattgtgtgtgtgtgtgtgtggggtttcagcttctgctaaaaggattgctgttgttggtgctggtgttaggtaaattttcgtctcttgcagagtttttgagtcatttgggaattctatgtgaaacttgtaactcccttcagtccaacgaacgcagtacaattttctatcaaatcatggtcctaatttccaattttccatatatattgttggaattatattgggattgtctatcactattaatagtattaggatcaattgtagagaagcacagaaatttttgggatcgaaagaatatctggattgccacattaacagcagatataattcttccaattggtttttggttcttcctaccttgacttgtctggtcaaacattataaactttaacctttaatatccattaaagtaaactataggatttttttgtctaaaacatgcttatataacatgaaatttgtgagaaaccaccttatatatatttttttgcgaaaacaaaccttaaacaaaattattatcgtgagaacaaaccttatgccaatttcgatcattgacccaaggttttggcattgaccgtgtcatgaattttgttgggtttaaaaagtcatgtgtcttgcatacgaaatggtaaatgcgggaaccttgggtcaatgtttggaatccgcataaggtttgttctcccaaaaaatgtttttgttcaaggtttgtttttgcaaaaaaacttatataaggtgctttctcagaaatttcatgttttataaagtagtatttgacaaaaaaccctaaaatatattatagaattattattgactaaattgtgtaaaaatgtactcttctaaaagtacattatagtattttagtggaacatttgcgagaaactactttataaatacgatttttgcgagaaatttcctaataaaaaaatgtgaagtgcaaaactatcttattgataattttctactccctcaaatccaaaatactatgaagtctttcctttctggtttgtcccagattagtttgtacgcttccatctttggtatgatcccacttttattatacttattagttttacgtgagttccttactctatctcttttaacaaaaatactcaactatctctatccaataaaaagttccttactagtcctatcacatctgctttttaataaaataacgtttgataaccacacaacttatatccttaaaatacacgttcaaccaagtgttgagattaatttggacggagggaataaatattttttgaggcatattggtagcagtattcggattccgataggttgactatgtttccaatgttgaccaacacttgccttgcatgtaattctaactttgctcttttttattcttcatttccctcgtattccatatacaatgtttagagacccattccttcctcttctcttctttcccttccttactatgctttgccataatcttcctcaaatgagtgcaaattaatttgtcgttgatgtaggccaactgattgtagcacatcttcatagttcatacctcaacacactcgtaattatattataccctacatgttaaatggctcatgaagctttattttatatcatacttcctccgtttcacaataagtgtaacacttttcttatttggaataatcacaataagtgaaaccaagctccaaatggtaagaaaagttcactcttattacaaatataccaccaaaaagtaagaggggatcacaacttcaatacttcttcactctactttattgtggtcccaactttctctctctaaattccttggtaactccccactttctctatgtttcacttatggtgaaatggaggaagtattttgtagtggtatttagctactaggccttggatgatatacaatcatacaatgtatttatattcacgataatttgctgcccaccttgattaccatgatttccaccaattttatcaatttcagtacttcaccaccccgaatttatattttttatttccaaccttggtatctccatttgtctgagtgcccgatccatttgtatcgcctccagaattgaagaagcttcctgcagctagacaattaggaaggttaaaaaagtttggagatggtggaggatagccataataatcattgttgggaggtggaacttggaaggttattgtagggttgaagtccttgatgaagaagaattgagttcaaatgagaggaaaaaggagcagggaagagggacaataagaaaaaaaagggtaaactaaaatcacgtgtaaggcatgtgcagatcaacatcagaaagcatagtcaacctactggtattagggcactgatacctttttgggtcaaaatttttttacaaggtatttcatgaggtagttttgtccatttttttttttacaaggtatcgtctcattttttttttatcatttagtttctcgcaataagtgtatttcatgaggtagttttttccaaaatttcctcatttattataaaatacctcatcttttccataaataatgcaatgtctagacttttacgctgtttacacatgctcctttgaccatctattgacacacaaggaaaaatagagtagagtcatgcaggatcttgttagatttttctcgatatatactttcaaaagatcaatttttttataattttttttttgaggggattttttttttataattatgtacttatcaaaggtcaaagttgtgcaccgggaagcataaaactctatgtgttgcaatttacatggaaggggaggagtataataagagaaaattatggtaaaaggttcattcctggagatcatgagaaaggaagtagaaagaacaaaaaagaacaatgggagtgcttttcaatgtttgttgtacgtagcatttattcatttgctataatgttttgtgacattgtagtggacttgctgccgcatataagctaaagtcccatggcttgagtgtgacattgtttgaagctgatactagagctggaggaaaactcaaaactgttgcaaaggatggtttgatttgggatgagggggcaaatactatggtaatgtttttgattattgcaggtcttgcactttagcgcacaattaatttctggatttttttttgtactgtggtggttatggtcatcaacatgtctcacccactgtgcttgcagatagagagtgaagcggaggtcacgagtttactcgatgatcttgggcttcgtgagaagcagcagtttgtaagtctttcattatctgaatggcacatactttatttcgaaagattgtaattgccttttctttctagatggcttcatcttcatgttgctttctgattcagtttcgtggctaactttccaagtttgtctgattgctaactctgtcatagccaattgcacaaaacaaaagatacattgcgagagacggtcgtcctgtgctggtaagtttgcttgttttacttttgacctcttttaagatctttcaactctggagcctggaaacatggtgatgcaggaggcaagttctctctattttacatcctttcttctctgtatcttatgacatttgcctcttattctgtgcagataccttcgagtcccattgcacttctcaagagcaatatcctttcagcgcaatctaaggtcgttttatgttaagacatacttgatgctgagagtttattgaattcttaaccttcttcttattttttttttatttttttagcaaaaggtaagtatattgcatttaccaaaaaacagtatgtacaccaccacagcagccatgtcagaatctagaaataccaccgaaaaaatcctacacccaaccagagacagttatattatatcctactcctaagtttctgtacccaatttacatcaatattggtccatttacaagatatttttataattcacagaagcacatcagttttaattagtttaataatgacctctggatgaataaccaactcagaccatatagccttattcctggctttccggaagttgtacgccagagcagcaagcacagcaatgcaaacctgtttcttatacctccttttatgtgtcttagcccatctcttatagctagtgaagatacagtcgtgtgcacaggattgaaccccaatccaactagcgaaagcctcacaacattatgactataaatacatctgaagtataaatgctgcacctttttctcctcttgcctgcacggtatcagaacaaatcccagctttagctaacaattccctggttttcagtttattcaatgccatcatgcaagcaatgaaagaatgttttggaacattcagtttgttccaaacacagtgagagcaagggacctttcctgcagttccacttagccacttatatccctgactaatagtatgactctttgcaccgtaaattgatttcaacttaactttttcataagcagtgaattgtgtgttgttagagtgtctagctgtctaggagattgggagaaaaggagggaccaaggagatagaaacacacctttgtgtttctttgtgtatttactttttagggtgggtcacgttttctgagaaatttgggaaaaggaagaaatagtaacacactttcccatttgtataacctgtatactggagctccaatataatttgcatttttttttgagctgcaagaatatgttgacaaacagttattgcttcttcctcagctacaacttatgttggagccattcctttggagaaaacgctatgcttctaagatttctgatgagcatgctcaggaaaggtaatgtcaagacatgtgttacctcgccttaattttcgttccaggaggtgagcatgcatttagaactaaaaggcacaaagactgttggtggtcttgcctgttcaaatataatggagaggagttttcgctacatttaccctctcttgaagtggggttgaaatatagcatcaagttgaatgcttgattaagtttaaaggacttgtgtaactctttttctgtttactgtgattacatgacctggttgattaacataatggtctgtttatctgtagtgtgggtgagttttttgagcgacattttgggaaagaggtaatggtttaccatagtatttctgctttagtggtaaattgtaatgttgctgataattatacttcgctgcagtttgttgattatctaattgatccttttgtcgcgggtacaagtggagatcctcaatccctttctgtaagtgaacattttgtgcttcactcccaattttttggaggctggaaatagattcttttccagttgttctgtcaaaaatagatgtagctttattttgaatttgaagttcccaattgttcattttgactattactgattattgctaagagtggcattatgctattatgctcctaaaagaaaggtgaattttgacctacatatagtataatgtatcaatattggtttaattgtttgttcttttgttccttttggtgctcatcttgcgccttgttctcatcgctcgttttttcatgttgcacttgatttaaatttgctcagcttaacttgtctttttgaatttatattacttattgctatattttactaatttcgttgaaactaattttttgctgaacttttcgttttgttgaaatcatttttctgaattaacttgattttcctgaatagaattgaattttggtgatcttaccttttctgcagccttttatttctttcttgtcctttttccaatctcatttttttatatttccattgtgttgacatcttatcattaactgtgcagatgcgtcatgcatttccagaagtatggaatattgagaacaagtatggaccataagacgtttattttaatcgacatgtatgtttcttagtttatacatatattaattctgtggtaaaaaaaccgaacaagaatatctttttttttttctatcatcaaaaagggtgaatatatgtagaggaaaaagatttgaatcaagatattagcctaaagcaataataatgttagtaatagctttaataacaaattcaaaacgtacattaatgaaccgagaggccggaaaatagttaaagtgaccactaagagaagcgaaggattcatgatgggttttcaacccagtagggcaaatttgttcaatgttctttacaaatcaagcttattaccttgtgggtgtttttgctagagatgaatgatagaattttccctagttggaagtcttttttggttactttatgggagctagtgatgtaatttgtttcgccttatggcatttcctaacatgtgcttttgtgatgtattgaagctttttttttgccttaatttatgctggattttaattttgttctttgtttcatttttcttgcttttgaaaaaaatatatagatatgtatatattaggattggtcgaggattttgagggaagggaaagacctaagaaaacttggatgagggtgattgatagtgatatgagtctatttgggatcgaagaaaatattcctttggataaggtgtagtggagggttgagggagcaaatttatgcagattagcttgacttaaagtttttctttttgattatttttcatttacttgtgttttgcaaacatttactcatgaatgatgtaaacttcttcaaccaaatctctggaaaaaaataatctacatggaaaaaacattattaatgttaacttgacagagatcccatccttgtgaagcagctagcaattaggcatctaacaattgacattttaatggacaggatagaatgtctcttgatagtcaataccctctgtttcattgtatcccatagctactaatctagtttgtatctttccaaagaaccattattttgaagtttcaccttgaacacccattttgaaccaatatgtttcttgcccttggggagaggggctaattgccatgttttgatgcggatgcaaagacacttgttctacctgagcctattgacttgatcatggatactctagggtttgaactcaagggaaagaatcaagtcttggcatgtgtggtgacatggcgtggggatggagtaaagaagagtcatagttctgttaggatatgttcttgcttgctacatagaatcgtagttctgttaggattgctatgatattatatctagtagatagattttatagttaattaggataaacatgtgatgatcatgttataataggcatgtgattagaggataggattagcttaattcttatcttgttgttagtttaattcttatcctagttttatgtttatcttagtcgaagttgtagccatataaagggcgttccattcattaataatacttagttttgctttgtgttttaaacatacttcttgattattgtttgcttgtgagctaactaatcaaaccattaaagacttttcaggagttttagtgctaaacatcttaatttcaggagtgattttaagagcgtttagtgatcttgaatcaagaaatatccttgttcttgttcgactaatatcagtggttttgttcgagttcttggagttaatctcttcaagattcttattcaacttgattgttgagcttattggtttagtaatcatatcaagtggtatcagttttccagggaggagaggatagataggattctctttgatcaacaaagatccaagggctatcaacaaggttcaaacattgctgcttgttcaagacttgatctttttctaccaagatgcattctttacgtcacaaggtagtaataacaagattaagagtggtttttacatccaagaatcaatctttcacgtccaagatttcatctttcacgtctaagattcattctttaagatcaagaaagttataacaagcatagaagaacacataaccatggagtccgagatggacaagcttgccaaagctatgcaagcacttgcaaagtcgcaaactgaatcacagagtcgactcaatgagaatactaccacaatcaatgggattggtagtaacatgaataggttggaggcacgcatggatgccattgcaaccatcatacaaaagaagcttgatcggaatagtgccaacttcataggtgccaattcagaggaagagttggcagaacgtgaagaaagatcatccaagactacatacaatgatgatcgtggcttaaagttggatgactataatggagatagcaatcgagaagacttgttacagtggattcgacaacttgagaaggtatgtgattatagaggctttgatgacaagaaaagattcaggattgcctccataagactcacgaaatatgctggaatttggcttgaaagcttcaaggcacaacgagccaagaaaggtaaagaaaagttgtgtagttggacaaagttgaaagttcaagcttaaagagaagttcttgcctagtgactatgaacaaaaatagttcataagactctctactataagccaagacacgcttagtgtacatgagtacaccatggaatttgacaagctagggcttatatttgacatagaggagaaagaacaatggaagattgcaagatacatcaaaggcttgaaccgccacattgccaagaaggtggaagtatccacttatcacacctttgaggatgtgacaaagttggctaagaagtttgaagaacatgagaaggaagagaagcctaagagttcttacacgcctaagtatgatactaatgctaaggccaaggctagcttcctactcaaagtggtatgaaggacctaagaggctaagaacctcaccccacctaaagaagacacaagagttgagaagcctaaagtcgtcgttccaaaggagaaatttgaagagatgagaaagtgcttcaagtgtcaaggaaggagacacatagcaagcaattgtcctaacaaaagagtcctcaccatgagacaatacctagctttgcaagaagaggaggatgtctattagttcgtccctgatgaagagcaaacttaggggaagaagaggaggaggatgcttttgctgaggatgatgcaaggctagtaggggtcaagaggcgcaccttacatgtcgaccatacacctagcatggagcaaatggaaaaatcttttccacactagatgcaaggtaggtgactatatatgtaatggtataatagatagtggttcttgcactaatgttattgtatctgaggtagtgtcaaagctaaacttagctacaagggcacaccctaagccatacaagttgagtttgctagatgatagcactggcatgagagtaaagaaacaagctttgatttcattctctataggggttataaggatgagttatggggtgatgtattgcctatgagtgcatgtcatctcttgcttggaagaccattgcagtttgataaaaaggtcatccatgagggggactctaatgtgtactctgtgttggttggttctaagagggtatgtttgcatcccttagctcctcattcagtggcgccaaagcaaccacctaagacaccaagttactttctatcttcaagggagttcgaacaagaggtggaggaagaaggttgtgcttatgccttgattgtaagacatgctgccacaagtgtcaagactactagcaatgagaagctcgaagccttgatgaaagagtttgaggatgtctttctagaggaactacgacccttgagaggcatagaacatgctgtagaccttgtacctggcgcccctttgcctaacaagcctgcttataagtgtgatccagtggcatctagggaattgcaacgccaaattgaggacctaattgaaaagggctatttaagggagatcatgagtccatgtgttgtgccagctttactagttcctaagaaagatgacacatggaggatgtgcatagatagtagagcagtgaacaacattacagtcaagtaaaggtttcctatgcctagattggaagatatgttggataagttacatggggcatcaatcttttctaagattgatcttcgaagtggctaccaccaaatgaggatcagagaaggtgatgagtggaaaacaacattcaagaccaagcagggattgtatgagtggatggtgatgccatttgccttatgcaatgcgccaagctctttcatgagcttgatgaatgaggtacttcgtccgttccttaacaagtttgtggttgtttacatagatgatatacatatctatagccaaaatgtggaggaacacttgttgaacttgcgtagcttattcatgaagcttagagagcaccaactctatggtaagattgatggcgacgaggttgacgggggattatggcggcagtgaatcaccctctttgccggtcactgaaatacaacctgaggtatctttaaattctgtaattggattgactaacccaaaaactatgaaattgctgggaaaaattgctggatgtgaagttgtggtgatgattgaccctggggcaacccataattttttatcactagctactgttgagaaattagctattcctgtgtcggaatcggaaggatttggggtttctctaggggatggacaggcggtgaggggtagtggaatttgtagaggggtgttattgagtttaaatggtggagttgaagtggaaacagattttcagcctctgggtcttggtaattcggacgtgattttgggtgtacagtggctggagacgttggggacagtggagagcaattggaaaacacaaacaatggggtttgaaatcgagggtgtcaagttcactttgaaggtgacccatcactggcgaggtctcgaatctcactcaaagccatgatacgtaccttatgtaaagagggtggaggtttgtggcttgagttgaaccagattgagcattatcaggagaaaacaccgcattcatcagccttacctgaaattccagttttcttacagagagtccttacccaatttcagtctgtgtttgctacaccagaaggcttaccaccgataagagaacatgaacatgcaatagttcttagagaagggtgtaatccggtaggggtaataccgtaccgttatccacagttccaaaaagatgagatagagcgcctcatcaaagaaatgttggcttccggaatcatcaatccttccacgagccctttctcgagcccggtgatattagtgaagaagaaagatgggtcgtggcggttttgtgtagactatcgggccctcaataaagaaacggtccccgataagtatcccattcccgtgattgatgaattgttggatgagcttcatggggcaacacttttttcaaaactcgacttaagggccgggtatcaccagatccgggttaaggccgaagacactctcaaaacagcttttcgcactcatgaggggcattacgagtttttagtaatgccatttgggttgacaaacgcgccggcaacgtttcaatcccttatgaacgaggtcttcaaaccattcttgcgcaagtttgtcttggtatttttcgacgatatattggtctacagtagttctgccaggaacatgaggagcatttgaccttggtgttgcacaccctagcagctcataaattgtttgtgaatcagaagaaatgtgattttggcaggtcggaagtagcatatatggggcatatcatctctggtcaaggggtggctgtggatatggagaaggttcaagcgatggtggaatggccccttcctaaaaacctccgggaattacggggatttttgggccttacagggtactaccgcaaattcgtacttcactatgctcatatagccaagcctttaactgatcaactcaagagagatgcgtttgggtggtctgaggcagcaactcaagcctttgaaaagctcaagaaggcgatgatcacatcccctgttttggcaatgccggacttccaagagttgtttgtggttgagaccgacgcatccgggtatggtctgggggcagtgttaatgcaaaacaaccgacccattgccttttacagtaagttgttaggtgcccgggctcaattaaagtcgatctacgaaatggagttgatggccatctgcatggcagttcagaattggagatattatctgctgggtcgacatttcctcattcgtacagaccaacagagtttacgtcatctcactcagcagcgagaagtaagtactgccttccaacgttggatgagtaaacttatggggttcgattttgaaatacagtttaagccggggtgtgccaaccgggtagctgatgcattatcccgcaagacagtgggagaggttgaattgggtgcgctgatattaactcatggggtggactggaccgacttggagcgtgaaattgaaggcgatcctctgttgtgcaaaattaaacaagacttccacgggggtgctattactcctgtgcacttttctttggtggacaacaagctgttgttcaagggtcgatacgtgattcccagctcttcggtttttattcctaccttgctgcgagaatatcacgattctcccattggagggcattcgggggacctcaaaacatatctcaggatggctgccgactggtattggaggggcatgcgcaaggatgtggcgcggtatgtgcaacattgtagcgtgtgtcaacaacaaaaaatgtctcaacagatgccagggggggtactacaaccactccccataccttcctcggtttgggatgacttgtcaatggacttcgtggaaggcttgccatcttccaagggggtaaacaccatcctcgtggtggtcgatcgtttgtctaagtacgcccacttcctcccactacgtcatccatttactgctgtgtcggtggcaaatgtgtttgtcaaagaggtggttcgtttgcatgggtttccttcctccattgtttcagatcgggatcgaatttttatgagtgtgttttggcgggaattatttcgtttacatgacaccacactcaaacgaagtaccgcgtatcatcctcaaacggatggtcagtccgaaatcgtcaatcgagctctggagacttatttgcgttgctttgtgggggaatacccgcgctcttgggctcagtggcttgggccgaattttcatataatacttctcctcatctctctaccaaaatgaccccgtcaaggtcctttatggtagagaccctcctactgtgatacgggttaatcggggagcctcacctgttgaaagcttggaaaacatgctccaagagcgagacgcagtattagatgccttgcagattaatctgattaaagctcaacagaaaatgaagagtagtgctgatgctacaagaagagaggtgcattttaaggtgggagatcgagtgtacttaaaattacagccttaccgtcagaaatctttggcttaacgcccttatgagaagttagccgcccgtttctacggaccatttactattttacagaagattgggcaagctgcatacaagttacaacttcctgtttctagcaaggtgcatccggtgtttcatgtctcccaactgaaacaggccgttggttccattcccgtttcagccactattccagagcaattgtcttctgacttggagttagaggtggaacctgatgaactcctcgatgttcgtagtgtttctagaggccagcacacttacttggaagctctcattcagtggcagggattaccatcattcgaagctacctgggaagatgtggctgctttccatcaccattttccatccttccaccttgaggacaaggtgaaactttgggggggtggtaatgtgatgcaccaaactaccactccactactcacctattagaggcgtaagaaaaagggggtaaatcaggaatagtttacaaattctgttgaaaggaatattttgtaattatgatgtcagaggttgttagcaaaaaggcagtagagtaacaataaaaaggggaagggaggagagaagaaggtattgagatttttgtaaggaacttggcccttgggagagttgggagcctctcgaaagctcaccattatcttgtgaatattttccttcctggttatatacaagaaccttcctctgtcaatttcttttctctctaatcttatttcttattctgttttctggttgccattgtttgaagttgcttgttgtgcttgagtaaatacgtgaagtggtgaaacccatctgaattcatcacatctattccaagtggtataatacaagcttgtaatccaaatctaatgagaaatctaagttatgaagaatttcaaaagaactaagtacccttgttttggatgcccaaggatttacttgccgctcaagttaatgctcaacgtgcaagatacaacctctttagtatcccaaggtagtttccataagaattaattgagctcaaatcaagaacaatatttttatgtattaatgtgaacacttcctgaattatattagatatatggtctgaaggttggaagaaagattagcttttaattttaagtttgagatagtttttagaatcgaggaaagattagctcttaacttgtaaactaaggattgctttataagtaaaacattagttatggaactcttaaaattggttttgaacatttctagttaaaaatcccatgtaattctcccaaactagcttaaaatctcacatttcacaagctaaggagagacaaatggcgttctcttgtgaaacaatctaaaattttcattaggctactgttttcaagtatttatatgttagaagtgccgcatataggtacataaaataagtttacaaacacaagtaggaataaggaaaactaaaagagaaacttcagccatacaaaaccggctgaaatcagctactactttctactttctagcttcaaaatctgattgcaagtctcctttaagccaatcaccaatgaaaacctttcctccacatgaagtgtgctcaaatcaagagaagaaacccatcattcgcctatagctacctgggtcagatgaagatacggcaaaaaaaacgctggaaatcagtgaaccaaaataagcaccaattggatgctttctgtccttgctacattttcttctcataggactacttcaagccatacatgaataagcagttagatccagctcctagcatccatttgatcgtacaaatgagctccaaaaagataagtaaaaccaagcagccaaaacctaattaatactaatgatgaattagttgaatagctaatgacgatgaagcaacactttagtaggaatagtgttaattatgatcaatgctacttaatcttctgattaatttttggaaaaatgtcatatctaccttctgtatacacttattcataactatatcgtattattattatttttaaataactaccttttaagtaccaaaacctaagaaatcaggcacttgatggattccatccaaagatccatttggcggggcccactaactgacttttgattttttgcctttcctcttttggttaatctcaatggttcatcaataacaactcaatcttctccccatttcatcaaatcatccctaaatcagaactttttcaaattcacccaaatgaggttatggaaacctctaccaagtttattcgaccacttttagtctagctcaaagttttacacttgcttcaaaaactaagatttattaactttagaaattaggtttttatttttattttttatttaactttgtaacaatcttaaataactcaggtgctttctagagtttggctttaattgtttttcccttggttatgtgaaagaagtatgactactttctccaagactaaagtagagagcaaaaaatgcaattctggaatttcttgcaaaagaaaaggaacgagttaatgataatgaaaaacaaagaaaatgatgagaagagaggagctgaatcaatcatgatcatgtattttaaagttttttttgctattgaagtgacttaagaagaggaaagaggatgagtgaagacaaacaaaagaaaggataaatagagggaaatcttgggcttagaaaggtgaaaaggtaagaagatgagttagtgggccccaacaaatgtatctttggatataatccgtcatgccactgtttggggcttgcttaagtccatacattacttcactaattttacaaaatttattttcttgaccaagaactgaaaaaaccttcagtggtgatctattaggttttggaagttaaaaggtagttatttaaatgtttttaatataaaaggtagttatttagatatttttaatataaaaggtagttatgtgaataaaagtgtatataaaatgtaattttttgacatttttgccttagtttttcttgctaattcaccttttcaacttgaccaagttgctatgaggagaaaacgagcaattattaagcaaatcgcaacactagcattaatccatggcccatgaaactctccataattagagattggattagcacttagtagaacttcttgctcctgctccaggtttccattacttctttatctaagtgcatcaaaaggttgttgggttatgaaaggtggtggttgtgtatagtcattgtcaaaatgttgttaatgcactctatttagaggatgagggattgaatagttttcacctcgtgacctttcattcctttttaaaaaaattgataatgtgtattggtcctatgactgtatgaatggtaataagctatctcatgagctgttactatcttcctcagagtctaggtagaagggtttgggctgataattttctactatgtgcaattagtttgttggatttggatatgctagttgatataggtcctttcccttgggccttctcttaatataggcctacagtgtgattgaagataaatcttctggagaatataagaacaatgagatggattggttagaggttgatttgttcttttggtgtaagactatttcgggttctctattggttatgttcagacgccagaatatgtgttggtgattgttttccatgaacatactttatccgcagagacatttttcttttttcttcctataagattatatttgtttcctctcttggtgctcatctcagtgtctctactttacgttaaactgttgacattacttgacaatgcgtatatttgtcgcatggtgctcttccctcactccacgtcgaccccatacatcaaaaaatgccattaaagaatattcgaactcacaaccttgtgttgaaagaatggaatccctaccaatgactcattaattcattttctctttaagaaataaatgatttcctcacaaacttttaggctttaagagcccaaaagataaaaacataaaataagatagacatcaacgtcaagattagccttaaatgcacaaagcacatgtcaaatgattgataactactcacgagttgcaactctttgggcgttgcctaatattaattggatctcttttaaaaattgttggtggttatggttggtggagaggaccatgtaacttttagctggtcacaactggtaatgattgtcacttttactgcccataaaaaaatttaaactgttgaatatgtttctggcagtggatctgacaaatcctttacaagttggcgtccattttgttttgccatgtgactcaattataatacgtgagttttattatccaccaggtttggctcactaatttccggattaattcaatctaaactgtctccaaagaaggaaaagggtggaggaggaaagccttcttctaatgaaaagacacgcatacgtggttcgttttctttccagggtggaatgcaggtattagcatgtagctttcattctgttaacatttgtggttcttccagacatacatccaatgctttttttttttcttgctataaccataaacattcttgtcatgaacattctttaatactgttgctgagcttagtgtattcgttcattcatgtaatttcctctcttgaggttaaaatggcatacagccttacaacctatatccataatgctccttagagtagaatccctaggttataacatagtaccacttatcaaaataaacatggcacacactgcaggacaagaagtaaatccacctagagaactgagcacctagtagtaaaagcagcgatacattactaataacagtagcagggccataagagtagtaaatgggcctcatttcaacactccccccgtaatggtgagagagaagaagcagtctgaactcccagcttggagagcaaaatagagtgttgctgaacagggagaaccttagtgaaaacatctggcacttgatcttgagatggaacataggtaggctgaataaccccttcttcatttgtattgtccctcaggaaatgacaatctatgtctacatgcttggttttctcatgatgaactagatatgctgctatggcaagagcagcttggttatcacagtagataggagtagcactggactttttaatgcgaagatctttgaggagttgtttgatccacatcacctcacacacagcaagagccatggatctgtactctgcactgaccacaagaaattgcctctttgactttcaagatacggggggagtcaccaaggagcacacaaaaccagatgtagaatttacaacacccatcccattcactatcacaaaatgctgttagttgagcactagacttgttcgccatgagaattcaccctgttggcagcttgaagatgcacattagtggggcagtgcataaatttgcttaaatcatgtatagtgaaggcaatatcaggcattgccttgtaatagtgagataaatgagcttccccatcaatttttgatacacatcaggttgttgaagaggatcaccattgtcagcatagagcttgacatgtgagtccatacgaagcctcaatcgtctgcaatttataaaaccatattcatcaacaagacccatcacatacttctttagagataaaaacgatacttcactacactgatccacttcaatcctcaaaaaatatcttaggccacccatatctttcatgtgaaattggccagcgaagaaactctttgcttcctcaatagttgctaaactattgccagcaagaatgaggtcgtccacatacaccaatatagcactgaaacagtgagagttttgcttgaagaatagagagtagtcacacttggattaagtgaatacattttgctttaaagcagtgttagcttggcaaaccattgcctcaaagcctacttcaagccataaagtgacttaagcagcttgcacaccttagttcatttggtgtcacttctgccatcagtacttagctccccctctccttgaactttgatcctgttacatgtttcactatatcctggtgatagcttcatgtatacactatcctacaattcaccatgcaaaaaagcatttttaacatccatttgtttgcaagaaccaaccctctaaggatgcaacaacaagcatgtggtcatctttgctacaggggtaaaagtctgctcataatctattccatatctctgtctgtcacccatgattacaagccttggcttatgcctattatttgtgccatcagtgctgtattttgttctgatccatccatgtgagggatggctcatttctacaaaatcctagttccgttaggatttgtgttgttttcctaattctagtaggaataggactcctaaaatcctaatcctcctagttctgttaggagtttaaaagttttagtttgattgtaattctagttgtgttagaaatccaaatcctagattcatgtcacgtatggttagaacatggctagtaggataatttgtcttgtgatgtccatagccttggcatttgtggcacctaactttcaatagcttgtcttctgtctccttttctttctccttctttgaggaatcaacgtttttagagctatctaaaccactagcatcaatattaggtttaaaagtgctaaaagatttcgaatagttcttacttgcatacaatttctttttctagtttatgtagcgtcaccagggaacaaaaactcggccgttccgttctggaacggccgctttgtaacggatttcagagaggccgttccgttaaataccgttctagaacggtgatttggaattcacaccaaactcggcgcgatagcgttacgtaacggtgtaacggcgttccagaaccgttacaatcacataacgtccgttatttgaagaagaccagttcttttggtggaggaagaagaagagccaacgcaagatctatagatctgagttaaaatttgaaaataaaacatgtttttttatttaaattaaagcttacagaggatgtagaactcaaattcgagtaaacccctcctttaatttcattaggttactgcaaatcgaaccctaaattgcaaaccctaatttcgaaaaaaccctaatatgcattgggatgcaacgctgcttctccggtcatggcagagaaggtcgacgagtcatcttcggctgcttttagcactgtagctgccggtggttggcttgtttgcaggttagtgcttgctggttttctttctctcataccgatcatcttcttcttttctctcttctctttttcttttttattgtgtgactgccagtcacgtgataattgcaactcataaagtatctctttctctctcttcttttcatccctttttatttttctttcccttttagtttttattccctcacgtggaatcacctaattttcatccttttttatttttttagttacactcttacacagaagtatgttcaaatatcattatagtacctcaaatattgtatttataagagttttggacataatatgatatagaaagtaaaatagaagaaaaataaagtttaaatgtcacttgtgtgatttttttaaaaaaattcacgccgcgacggccgcgaaacgttctatttcccgttacaagccgttcccgcgataacgcgaccgttcccgcgaacgcgaccgcgaccgcgttttttttccttgagcgtcacatcttgcaagcttcttcaaaggtgagttatgtgtacaactccaatttctctccaatcccctccgtcctcatttaggcctccaaggaagctacttaaacattgatcttcaagttcatcaattttccaaagaatggataacttctcgaactcctttatgtaatcttcaacggacatattcccttgtttaagagtagaccattccatgtacaagctttgtttgtagttagaaggaacaaaacgtcctcttaacaactttttaagcttatcccaagtagagattttgggtttattagctttcacacgctgcctctttactccatccaaccaaatagatgcatatttggttaccttaagcacggccaccttgtatttcttttcttttggtgtctcttaatcccaagtagagcttttgcgtgtgaaagctaataaacacaaaatctctacttgggataatcttcttcttgtttccgaaacaactaattcttatggtagttaggaaagcaagaatggtttctaattcaatagggaatatattaattattattagtttaagttaaatagtgcacgaatctaaatagattattcgtctcaaaatctcacttaagtatagatttgtttggacatctgagggaagaagaagagagcgagataaaggagaattatcactcaatgaatccatatcccgagttttcccatttacttctttgaaagcaatatagttcacgaggtcttattatcagtctatggacataagagtaataatttaagggcaaaaactatgactttatgggtttaaactgatacatgttctgttaaactgatagatgttctgtgttaaaccgatactcatatattcctggttaaactgatagatatatgatttaaattgatacccgtctcagtcatgtcttggattgagacggtctgacacaagactttttgtgtattatatatctgattagaataaatttatcctgtttactaattattttatcttctccagacacttgttgacacaatatgcaatcagtttggtaaagatgaactcaaactacagtgcaaggtcctttcattgtcctacagtcataaggggatcccttcttcagaaaattgggtcgtgtcttctgtgtcaaaaaattccattgaagatcaacaatatgatgctgtcatcgttaccgtgagttttactttgcttactgctattgcaccaatctttcttcttttgacacactgataatggcaatgctgttgtggtttgaagccatgttatggggttttagggatatttatggagtctgatctaatatgttattggataaaattcagatctgtaacgtgactcaatgagattgaaaaaaattgaatcaagataatggattggaaaattaggagctaacctagggtctataagcgatccacttggagtctcataccaagcaggtattcgacattttaggtttatattgctgctatggctcatatgggagcctacatagggtctggtgcttattcctttttcttttgtctagttttggggctgcacatttctgttgtgttttgatatggatagccatcacctgcaattgcatggaggctgaactaagttctataggggagcaaacagtatctgttggaaatttattttcatattgtgtttttaaatgctataatccaaaatttgttgttcccctaaaatgcctaaaatacccttatgtaactgctccatctgtcccttaatagacttcccatttctccaatgcatgtttgccaatacacattttgtattgttaatatcaaaaattacatattagtaaaaattataaaagtttgattttcctaatgtacgcaatgagacgaatcaaacaagacgccatatgactatgttttttcttatacttcctatgttttttaataagtgacatgttttccttttagggaaatgtcacaataagtgacacatagctcaaagtagtaaaaatacttctcatttattacatctttgccattatttaattgtttcacctacctactttatccaatactcaaatttgattggttgaacaattggtcccaactttctctagactccttggtattccctttcccccactttctctctgtgtcacttattaaaaaatggaggacgtatattggaaaaaaattggaaggttttcttcacttatgaatagtggtaaaattagagatgggaaggctattttgggatggatggagtaatatttaaatttttaaaataatgtcattgttttagtgatgaaataaaattcaaggctattttttctagtaattatgttatctgtacatcaccacacgtatcgcgtgcatataagactagtttgatgatattccaacactgttcgaaggaagtcaggcatggaaccatgtttgcttccatatgggaaatattttgcttactctccttcaaacatctacctcattatcccagaatgattgatcgaatctaatacaaatatacaattgatcatatgccaccagggaattacatcaaattaaatttttatagaaggggaatcagtcatagcctcatagggaacgaataagtgatactcgccagtttctttcctggttacttttcctcttctcactagccatcctttatgtatgggtatgctgcatcattcctgccactggttgggactcccgtttgaactatggggggatgggaaagctaagccatcatcttcaaattgagtttcttgagaatgtaagacaccatctgtaagatgaatatagtgcactctatagtcaatgtcatgatctttatgggtttatctgctgaaataactgtgatatacccagctctccatttacaaagttttcctacatattaaactcttgcccgcaattctagaacttcattgtagaacttttcctacataagcatcatttgtcttttctgtagtaaaagttagaaagagctttattttagaacattcgtttttagttttctttgttgttgattactccgccacttttaatacttttatgattcaagtatttgacaaaatcatgtaatttaggtcctctgctgcatgcagtctataccctctctctctctctctctctctctctctctgtggttgtgtcttacttgttgagttactaactccagccattacataaagtaggctggcattatgatgagcaaattactcaagaccacatgttagctcctttttcttttctccttattctgaaaggcaaatataggtccatcttggtgcttctcatgtcataagtaagctgaccccctccttttccagggaataggacaataatccaaaagtgagggttttacatgttgggatttgtgaagtttcttattttacttaatagccgagtcagtgttacaatacatagtaccgtgttacaaaatagtatgtaacaccaagcatgtttatgtgcaaaattgtgcaagactttgttgctggcacgccaagggctgttttaatgtagtttacttattcttttaggtttttcagatgacaatcataaagggaattaggagtgtttttattgtagtcaatccctattgtgctacaacgataaaagaaaaaagcacaagactagaaggagaagtaatgtctaggaaagactcctcacctggggttgctagtcacctacacatcttagaaggcatcaaaccaaagcttattcccctcgactgttttcgggagaaaagaagacaaaattgtttctaacttatactttaccagtttcactacagcatcagaaagaagcaaaatatgctcccacaacacggcgaacctagctttccagatgtgataaaccagaccagcaaaatgattattttcactagagctttgagtctattttttcggtttttccccttcttcctggtaatgtcacgccaccaagccatcatctcaattttttgagatttgacgtaatcgctcaaatagctgagtaagacacttcttgctctaaatactaataaaaaagaggtgaatgtgggtctcagccatgttactcaaatcggataaagtgtctactcttattagggtttttgggtgttggactcatccatttttttttgtaaaatgtcaagattttggtttgaaatgagagattcaagtgtcgtgacatgagtcggcacgcaacacttaaacgtgtcgaagtaacagagggtctcagacaatcaactttaatcaatcacgaaccccaaaatttatgcaacctttgctcatattcagtctctgtaaagcactcaactgcagcacacccacccattcgcttcacctacagcaggagggcacccaagtaattgctatgatgagcgaattattctgttttgccttgctggaatattgctgttagatttgctgactcactggcagttaattatagtcagagaatgagaaatatcctgtagagagagaaagggtatcttttgtatttagctctataaatagctaaggaagggaagggcattgagagtttatgatattataataggagagatttagcctctcgaatgctgataggagcgtagctcttgttggattatcaatactactctgtttgctctatctatttctactcaggttccttcttgtacagtggatccctgattggatttacttcatcaaccagcagataaaattatttgtaggcacattgaaaccattccaaacctaatgaggccaaagtttatcacaaagaatataggagccaaatgtaggcaacagataagagtataattgccagaagttgaagactccaggtattgttcagaaaccttaatgcatatcatcattctgacactagattttccccggagccaactaacaaaaatgaattaaagagattaaggctatgtttagttcacctgaaattttctgatctgaacttatctgatctgatctgaacttattttttctgatctgatctgatctgatctgaaccaatctgattacaagatcttatcttttagatttttctcaatatataagaaaaaatatagtcatgtggggtcttgtttgattcgtctcaatgagtactttattaatattcaattattataatttttactaatatgtaatgaaagatataatgatttttaaatataagcatgatctgaactgatctgatgtgaacttattttttctgatctgatctgatctgattagatctgaaataagcaaaaataaggtgaactgaacatagcctaagcaacaattgagggaaaataagatcattatggctaagataagataaatatgtaatgataaaatcagagtaattatatcagttacactctcaacattcgtcagattgaggtttcctcccaaaatgccaacccacttttctgtattttcacgtccttctctctacccttctaggtatatattacatcagctgtaaaatttttgaaccaactagtagaatactgatctaccctcaactgcctcactttctcattttttctgggcctttttctctctagcacaagtccacataagtgatgcatagcagaaatataattccactagtcatcctcaatattgatataacaaacacatcacccacatattatcatttttaatcgctgcatgcgaggcatacttacccaccaatcaggatatgcataacagcgttcctaattccaaaaccaccatatatcttgggtttgcaactctcatccctagcaacaaggggactttctgaaaaagtggcagattccgcccacaagtagtttgtacggacacctttattatattattaatatcatatttcggcaacacaaattaccagcccagtaaaacatgaattgacatgagactaacaaggggcccaatctaatatcgtacgtctgtactaagcaatgtataaaaaaaagctcaaggtgcattgatgcaatagggatcctaatgtgcataggtgcgcctcattgaagtgaggcaccactaaggataaataaaaaagattgatgtaaaattaaattgtgcaccttgggtgcgcctcgatgaactttttttgtgtgcctaagtgtacctcaagtacgcctcattgatatcgcctcgcctggcagaaaacgagcttgaccccaatcgccttgctccccaccgcctaggcgtgcctcagtcacactttttaaatacattggtattaagtactcagaatggcaaaaagaaactttgggcattaattagacatttcactttttgtgcaactatttgtgacttcagagattgatatgttttctacattacagacttttgtgatggctgcatggtctccactgtcaaagaacattagtttaagtagaagaaatattgctctattaccttcctccctctacaaacaaaatcctaaaatgtggttatgtagtgccaattcaaacttgtagatgcatgactaatgctttcattatgctgtgggtttttatactatgattcatgtccaattacataacaattagctggagtcaggatatgtcacggaaattttaagcctggcaggatgattgtttatattttctctttttcggtgtttaagtcaaagtaaacttctaggctgctcttttataggctagttgggctgttggggagatctacacattaagtgtgaagaaatcttgtctaactccagtttggttgagaactgtaagctgtcataacatttgttgcatgatgaggccttgtgggattatcatgttagctgtaaactctaaacttacttgaaatctagtgttgtgtctccttatttctgtagtcaaaattgaaccttctgtacgtttttgatacctgcgactagaatgatggaattctgaattactgatactattacaaccatctgctaagaacgaagatgactcttagctaatttctcagcagatttagagaaattaagaagaattactaatgaatatttaaagagaaaactaccaagatatgattgtattgatgaaaaacaccaattacaacctaaccaacattcgagaggttggagctctcccaagtaaccatttctctcactaaacttatcaattttcaagatgccttttccattctcagttcctctatatttatactactccccttagcaaactacccaacttattccccaagtaaactaaagagataatatctaaaatacccttccccctacaataatattagttcttagcattaccggccccctaaacttccaccttgtcctcaaggtgggtcgtaatcatcactaaattctgggcctctactcgtatattcagtgtcttgcagcccttcaggccccaagcctaggttatgcagctcgtgttgcggctcctcctcatatagttctctggctggagtgagtgcctcaactataatgaaaaagtcctggaggtggggaaggaaggagtgtctgaaatggtgtggtgtgctgctggtgttatgggcttgtgcctgaaagttttgggtttaaagagatggagtggagaagagtggagaagtgactggagacgtaaaagaaggaatcataatttttgtaagtggtgggttgaaaaagttggtgggaagaattgtttttataaaatgtagtgtaatggtcgaaaaatgggtggagtaagtatggtttttggctggggatgtggtactgggttgaaaataaataggtctgagcttacttgtaaaattggcctcaacatgagcaggcccaatatcttgagccaattccccaaaagctggcaatagagcactcttaattgcattgttgtgggccatcgggctccaaacatatattcggaggagccggacttctttggtgatgtcattagcttggcccattgcacactttcccttaacagcctcaagatcttttcccacttttgtaccccaaccacgtggcttcaccatcctttctttcttgcttttgtcacttttttggcaatatacgagtttgtccttactaccctcatcttctaatgttggcttcctcaccaagcttaatttctggaattttgtccaccaaatcccaccacccatcgtcaacaccatacctatctacaccggccaagaagcctggtcctccacccgaattttcgccacagacaaagcctgaacaaccgtcagttctctcaccggagaagttcacaggtccaccacctgacccactagttgctgatccacccttcacaaatctccctcctctggctgccacaagtagtggttcctccgtaatactcatatttctcgtccaagagccctggaccaccaccggacccacttccaccggcaccaacttgttcaaatgatacttctctttcttttccaaacagcctacttggactggaaaaaccactgcgattgtagcctccgccagatctgtagcctagtgcacctaacgtgcttccaactgcaacccaatagggatggaaatggatgggattcggggagggtggagcatcacccgcatccgtcacccgcatccattcgctccacccgctccacccgcatccatccatccgtcacccacgggtgaaacgggtgggtcggtgataaacgggtggaaccatttagggggtgtttggtatcatgtttttttacaaaagaaacagaatcaagtaacaaaatccgtttctacttgtttggttctatgttgctcagactcgagtacccatgtccgacacgggtacgtgtccaagtgtccaactcagctattttctagaattttttatattttttaacccaaaacaaagtgtccaagtgtcccacccatgtccgactcccgaggatccgacacgggtacttgaggtgaaatgaagagtccgagcaacggaggtttggttagtgtgtaaagtaacaattaccgttacttgaggaaaacacatccccccaagttgtttccattcaaaaacctaaggaaacaaataacgtttcactcctcaaacaagaggaaagggaatgggttatatttatttccattccattaggataccaaacaactaataagggtaacacttattattatcctttcccctccttatcaaaatcctttccattccgtttacggtattcataccaaacacccccttagtatattttctaatgaaatttgtgatatgatatgcatgatataaaataattctatcaaaaatataaaaagtaagtaaacttacatgtacaacttaatagatgggtgatgggttggaggttaaacgagtgatggatcgggtgacgggtgaagaaattctcacccaccactcgctttccatccatttaaattaggtttttcatccatttaaaaaaccgggttaaacaggtgatgtatgatccatcacccatttccatcctcaaacacatcccgatttgtttactgcaccaccagatccaccagtataaccacccgaaaaatcatcatgccttctactagccttgtaacctgctcccggtgagaagcttcttccacaagtggtggtcgctggacctccatctccttcttccccaaaaaattttccatgacacccactcgacccttcatctgtgacaacctcttcttcgtccacctctgaagttttggggtcgtcttcctcctcaagctcctcttgaagtaactttaacttccgttggatgggagagaacgcttcattgattatcttcaccagatcttcttgaagtttctcgaaactttttctcacgttttcctctacctctttcgtgatttcctttccgatctccttcatttttagactaggagctcttgcgattccatggcagatttctttttttaaaacaagaaaatcaggcacttaatctcccagaatagtggtgctctgataccattttctaagaaccaagatgactcttagctaatttctcagcataacaacaaatttagagaaattaagaagaattactaatgaatatttaaagagaaaactactaagatatgattgtattgatgaaaaacaccgattacaacctaaccaagaggttggagctctcccaagtaaccatttctctcactaaacttatcaattttcaagatgccgtttactactccccttagcaaactacccaacttattccccaataaactaaagagataatatctaaaatacccttccccctacaatattagttcttagcaccatcaaactgggatggatggttttgtaaggttccaatttacttctccatcaaaatattttaggattttttatctcatgtattttagagtttcctcgtccctttttatctgataagattcttctgatgatttgattttatggtaggctccaatcagcaatattaaagaactgaagattctgaaagctggagttccattttcacttgacttcattccagaggtttgtatttttatagtggttagacatgcttcccctagttttcaaagtaaaagcatccttgttgtgacgatattttttcccttgtttttgtttttattattatcatcacttatttccattttctattttccatgctgataagatgttcatcaccataatcttgtggtatcagaagtgtttagtggagtttattcactacacatgcagttgttcttttgccatgaccgccattcattttctcgtcaaaacaaatctatgaagtttggttttcagactcatggttcttgtagctcttgtgaatttttttttcttctccttgcatgcattcttcaaattacatattgcatataccaggtgctctcctttattttatatttaatttttaaaattctatcatatattttttaatgtcaaacctcaaactaggggttcactgcatcttaggcttaccaggctaatatttctttacttaaccttttccctttatatttgctatcctcttgtgtagtaatcaccataagaagggtacaaactaaattaccctcccattcttttgtatcattctgaaatagtgtcacagagctttgatttttttgccctcatttaatctggcaaatgttctctctatttttttttttttactttcttttgacgggattctcaggcaattgttacggggagcagccagtcacactgtttctgtttattatgcaggtgagttacctgcccctctctgttatgattactgcgtttaagaagaccagcgttacaagacctcttgagggcttcggagttcttatcccttcgaatgagcaacataatggactgaagactctcggtaattgtctggttcacgtgtgtagcgaatcagattttcaaaccctgatttcgtaacattgcaggtactctgttttcatctatgatgtttccagatcgtgctttctccgatatgtatctctatactacctttgttggaggaagcagaaatagagaacttgcaaaagcttcaacgtatgagatatgcaatgttttaaatgtatgctatagtcatcgtttcaaccttttggtgcctttttcttactaatttatcctcctggtttaatgatcttagggatgaattggagcaaatagtttcgtctgatctccaccagctgttgggcactgagggaaaacctacttttgtgaagtattgatatctttcacccaacttaacatgatttgtgcttataatatgttaaataaagtaactgaaatcctgaaattaagactacgaaactgtatggtgacagtcatttttactggaacaatgcattccctttatatgggcacaattacgactcagttctgagagcaatagaaaagatggaaagagatcttcctggacttttttacgcaggtaatctgtcatttgcttgttgcgataaagttcatgtacagttggcatatcaatcaacttgcattctttcttgctaactccaaacaatcaggatcattaacttgtaggctgcagcaacagagagtatctcccaagttgttaggtttcatgtaacctcgtcgctgagatgaaatttccgttggctaaaaagtgaaagttttgtattgatgttacccaaaacaaaagtattttgcatgttgcttgaagttttggttgtttcagatagtacatcctttgacatgaaaataaatggaaaagcgtatgtcaagcaattatcatctagtttctttgtttctagatactagccgcatttgatcccagatcatttttgaggaagtcagctgaaataccgtagctatccttcagttttcataataaaactttaatggatctgatgtacagtaatttagtgtgcaccgggttaataattgatattaacttcatatagtgagtcttataaagatataatgaacttatatacaatatagtggattttattaatggaaaacatatagtgaaactatatgcaatatagtatgatacataaagacttagacaacaagagcattcgaaattacaaagaacaaaggaaagaacaattgtatcaaaccggttcgaatgaacaaacaaccaccacttccacaatcaatgtaccaccaatcaagactaaactataacaatgagcttctagtttaagtctactttgagttttaatcaccaattcaacgattagatgatcaaaattgcaaaggttaagagttggtcaaacctaaccaagagttacactaggcacatagctttgttaggagtatattagtttatgaattctagttaagttagaaatccaatacctagttggattaggattcctaattggattagaattatagtttagttagaattctagtaatagtaggcgtgtgattaggagatataattagcttaattcttatattgttagtttaattcttatcctcgttttaggtttatctttagtcgaacttgtaccctatataaggggcctttatttcattaataatatagtttattttgagtttaaacctttacttgtgattgtttgcttgagaggttattaatcgaaccattaataacttttcaggattgttaagtttttagtgttaaacatcttaatttcaggagtgattttaagagtgtttagattcttgtattcaagtttcaggactgatcttgaatcaagaaatatccctagtttcgactaatatcataagtagttcgaattcttggagtcttttcttcaagattcatattcataacttgattatttagacttcttggttttgtaatcatatcaagtggtatcagttttccagggaggagaggatacaaagggttctctttgatcaaagaagatccaagggcatcaataagaatgacacttgcaataagttcgagtgatacaaacaacttcaagactcgatcttttgctaccaagaaccaatcttgacgcctgaagattgttaggacaaaggataagaagtgtttctacatccaagattgcattctttacgtccaagattgcgtcaagatccattctttaagttcaagaaaggagtagaaagcattcgaacactacttaaacatgacatccgagatggataagctggctatggccatgagtgccttggcacaatcacaaactgagtcacgcaaccacatgggtaggatggaggcacgtgaccgtggattgaaactagatgactatagtggagatggcaatccagaagacttgttggagtggatttgccaactaggcaaagtgagtgattataggggctttgatcacaagaagagattcaaggttgcttccattaggctcacgaagtatgctggaatacggctcgaaggattgcatgcacaaacttcttgcctaatgactatgaacaaaaacagttcataaggctcgcatcaataagccaaaacacacttagtgtacacgaatacagcatggagtttgacaaattagggcttatatgtgacatagaagagaaagagcaatacaagattgcaatgtacattaaagggttgaatcgatatatagccaagaagatcgaagtctcaacttatcacttctttgaggatgtgactaaattggctaagaaattcgaagagcatgacaaagaagaagggcctaagagttcttacacacctaagtatgactctagtgctaaagggaaatcaacagttccctactcaaggtggtcggaaagacctaagaaccccactacacctaaggaggacactagcatggagaagacaaaagtggccgtacctaaggagagtttaattttgtgttttatacatctttgcttaagagcttaacaattgaaactattaataacttttcaggatggttaagtttttagtgttaaacatcttaatttcaggagtgattttaagagtatttagattcttgtattcaagtttcaggagtgatcttgaatcaagaaatatccccttgttcaactattataattgatcttattcgagttcttggagttaatttcttcaagattcatattcatacttgattattagacttcttggtttagtaatcatatcaatatcattagcattaatttacccccagggagattaagaaaggattagcctaatcaaggcgcttaagaagtttttaggaaaaatcgtgcttgttaagcttaagaattgaacttctttcaccatttgcccttgattctcttgttgaactagaagatcttggttcatagtagatgctcctgcatcatagtagagcatttaattttaattttttaacatgcacgaagatgtaggtagtgtagtatatatcgtgagacgtggtttaacatatagaaagatgtagtttctgcatgatatagtgagtttttgcatgatatagtgaatgtctgaatgatacagtggatcgttccgaattgttgtagtttgtatgatatagtatttttgtgaatgatatagtgagtttcttcatgatacaatgggtttctgaatgatatagtggattgcttagaaatgatatagtgagcttttgtatcatgtagtaggtttctatgtgatataggttgttaaaagatgatacatgcttttggcctcatgtactctaatgttaacgtgaacccggtccttgcaagtcaattgcagttttttcaatattaagctatttttttttttttttttttttttttttttttttttttgtacgggaatatttagcatctttaccacaaacataaccatacgaatattatgcggaaattccagtctgaagtcttaacttttcaaaattaaaagcttctatattatttttggaatgaaaaaaaatgagctatggcatgttattttgaaatacaatgagtctcaaggtgcatagtggcttcaattctacgaataatgaatggactactgatttctaattttttgttccgggcttttgcattaggtaaccataaagatggactctctgtgggaagaactatttcctctggatacaaagctgcggagcttgtgatatcctatctcaactctacttaagatgcctaaatgatcgaggagactccgtaagtcctttctctgattctatctttgaactgagtggaaacacgactgtggtctaaagtagttgatgtctcagatatccagaaatggcgttagtgatattcaggagctgtccattgaccctttgattcattgttgcagtttactgaaagttgttagctggtctcagaaaaacgaaaggaaaaaagggggaaaacaaaaacaaagaaacgtagattgtggtgttaaaatcaagaattccagagatttgtaccttctttatcagttgaattgtttacagtgtgaatcaagaagttagctcgaccttcttttcttgtgaatggtaagatttcgtgatcatcaatacttgattgtgctgtttgcaacttcaacggtaagatttcctgatcttacagtttaattgcttgtgctgtttgccactt

SEQ ID NO: 98 - DNA, 1572 bp, synthetic construct
  source 1..1572: mol_type = other DNA
atggtaatgctatacgattctcacctctcaggagtctcaactcatcttcaactatcgcaggcatttcccaggaagaacccattaatggccaaagtgtctgagccgggtaaacccacttctgctaaaaggattgctgttgttggtgctggtgttagtggacttgctgccgcatataagctaaagtcccatggcttgagtgtgacattgtttgaagctgatactagagctggaggaaaactcaaaactgttgcaaaggatggtttgatttgggatgagggggcaaatactatgatagagagtgaagcggaggtcacgagtttactcgatgatcttgggcttcgtgagaagcagcagtttccaattgcacaaaacaaaagatacattgcgagagacggtcgtcctgtgctgataccttcgagtcccattgcacttctcaagagcaatatcctttcagcgcaatctaagctacaacttatgttggagccattcctttggagaaaacgctatgcttctaagatttctgatgagcatgctcaggaaagtgtgggtgagttttttgagcgacattttgggaaagagtttgttgattatctaattgatccttttgtcgcgggtacaagtggagatcctcaatccctttctatgcgtcatgcatttccagaagtatggaatattgagaacaagtttggctcactaatttccggattaattcaatctaaactgtctccaaagaaggaaaagggtggaggaggaaagccttcttctaatgaaaagacacgcatacgtggttcgttttctttccagggtggaatgcagacacttgttgacacaatatgcaatcagtttggtaaagatgaactcaaactacagtgcaaggtcctttcattgtcctacagtcataaggggatcccttcttcagaaaattgggtcgtgtcttctgtgtcaaaaaattccattgaagatcaacaatatgatgctgtcatcgttaccgctccaatcagcaatattaaagaactgaagattctgaaagctggagttccattttcacttgacttcattccagaggtgagttacctgcccctctctgttatgattactgcgtttaagaagaccagcgttacaagacctcttgagggcttcggagttcttatcccttcgaatgagcaacataatggactgaagactctcggtactctgttttcatctatgatgtttccagatcgtgctttctccgatatgtatctctatactacctttgttggaggaagcagaaatagagaacttgcaaaagcttcaacggatgaattggagcaaatagtttcgtctgatctccaccagctgttgggcactgagggaaaacctacttttgtgaatcatttttactggaacaatgcattccctttatatgggcacaattacgactcagttctgagagcaatagaaaagatggaaagagatcttcctggacttttttacgcaggtaaccataaagatggactctctgtgggaagaactatttcctctggatacaaagctgcggagcttgtgatatcctatctcaactctacttaa

SEQ ID NO: 99 - DNA, 37009 bp, synthetic construct
  source 1..37009: mol_type = other DNA
tattccatcgaatgtagcaaattgactgtccgttgcaatttcggagtttccactcgtcgcatggtaaatggtaatgctatacgattctcacctctcaggagtctcaactcatcttcaactatcgcaggcatttcccaggaagaacccattaatggccaaagtgtctgagccgggtaaacccagtaagtcaaacattcgaatcacaactcaagcaaatttgtcttgtttgcgttatattttgctcatttcagccttttttgtttttccgacctttgcatactgaatattgtgtgtgtgtgtgtgtggggtttcagcttctgctaaaaggattgctgttgttggtgctggtgttaggtaaattttcgtctcttgcagagtttttgagtcatttgggaattctatgtgaaacttgtaactcccttcagtccaacgaacgcagtacaattttctatcaaatcatggtcctaatttccaattttccatatatattgttggaattatattgggattgtctatcactattaatagtattaggatcaattgtagagaagcacagaaatttttgggatcgaaagaatatctggattgccacattaacagcagatataattcttccaattggtttttggttcttcctaccttgacttgtctggtcaaacattataaactttaacctttaatatccattaaagtaaactataggatttttttgtctaaaacatgcttatataacatgaaatttgtgagaaaccaccttatatatatttttttgcgaaaacaaaccttaaacaaaattattatcgtgagaacaaaccttatgccaatttcgatcattgacccaaggttttggcattgaccgtgtcatgaattttgttgggtttaaaaagtcatgtgtcttgcatacgaaatggtaaatgcgggaaccttgggtcaatgtttggaatccgcataaggtttgttctcccaaaaaatgtttttgttcaaggtttgtttttgcaaaaaaacttatataaggtgctttctcagaaatttcatgttttataaagtagtatttgacaaaaaaccctaaaatatattatagaattattattgactaaattgtgtaaaaatgtactcttctaaaagtacattatagtattttagtggaacatttgcgagaaactactttataaatacgatttttgcgagaaatttcctaataaaaaaatgtgaagtgcaaaactatcttattgataattttctactccctcaaatccaaaatactatgaagtctttcctttctggtttgtcccagattagtttgtacgcttccatctttggtatgatcccacttttattatacttattagttttacgtgagttccttactctatctcttttaacaaaaatactcaactatctctatccaataaaaagttccttactagtcctatcacatctgctttttaataaaataacgtttgataaccacacaacttatatccttaaaatacacgttcaaccaagtgttgagattaatttggacggagggaataaatattttttgaggcatattggtagcagtattcggattccgataggttgactatgtttccaatgttgaccaacacttgccttgcatgtaattctaactttgctcttttttattcttcatttccctcgtattccatatacaatgtttagagacccattccttcctcttctcttctttcccttccttactatgctttgccataatcttcctcaaatgagtgcaaattaatttgtcgttgatgtaggccaactgattgtagcacatcttcatagttcatacctcaacacactcgtaattatattataccctacatgttaaatggctcatgaagctttattttatatcatacttcctccgtttcacaataagtgtaacacttttcttatttggaataatcacaataagtgaaaccaagctccaaatggtaagaaaagttcactcttattacaaatataccaccaaaaagtaagaggggatcacaacttcaatacttcttcactctactttattgtggtcccaactttctctctctaaattccttggtaactccccactttctctatgtttcacttatggtgaaatggaggaagtattttgtagtggtatttagctactaggccttggatgatatacaatcatacaatgtatttatattcacgataatttgctgcccaccttgattaccatgatttccaccaattttatcaatttcagtacttcaccaccccgaatttatattttttatttccaaccttggtatctccatttgtctgagtgcccgatccatttgtatcgcctccagaattgaagaagcttcctgcagctagacaattaggaaggttaaaaaagtttggagatggtggaggatagccataataatcattgttgggaggtggaacttggaaggttattgtagggttgaagtccttgatgaagaagaattgagttcaaatgagaggaaaaaggagcagggaagagggacaataagaaaaaaaagggtaaactaaaatcacgtgtaaggcatgtgcagatcaacatcagaaagcatagtcaacctactggtattagggcactgatacctttttgggtcaaaatttttttacaaggtatttcatgaggtagttttgtccatttttttttttacaaggtatcgtctcattttttttttatcatttagtttctcgcaataagtgtatttcatgaggtagttttttccaaaatttcctcatttattataaaatacctcatcttttccataaataatgcaatgtctagacttttacgctgtttacacatgctcctttgaccatctattgacacacaaggaaaaatagagtagagtcatgcaggatcttgttagatttttctcgatatatactttcaaaagatcaatttttttataattttttttttgaggggattttttttttataattatgtacttatcaaaggtcaaagttgtgcaccgggaagcataaaactctatgtgttgcaatttacatggaaggggaggagtataataagagaaaattatggtaaaaggttcattcctggagatcatgagaaaggaagtagaaagaacaaaaaagaacaatgggagtgcttttcaatgtttgttgtacgtagcatttattcatttgctataatgttttgtgacattgtagtggacttgctgccgcatataagctaaagtcccatggcttgagtgtgacattgtttgaagctgatactagagctggaggaaaactcaaaactgttgcaaaggatggtttgatttgggatgagggggcaaatactatggtaatgtttttgattattgcaggtcttgcactttagcgcacaattaatttctggatttttttttgtactgtggtggttatggtcatcaacatgtctcacccactgtgcttgcagatagagagtgaagcggaggtcacgagtttactcgatgatcttgggcttcgtgagaagcagcagtttgtaagtctttcattatctgaatggcacatactttatttcgaaagattgtaattgccttttctttctagatggcttcatcttcatgttgctttctgattcagtttcgtggctaactttccaagtttgtctgattgctaactctgtcatagccaattgcacaaaacaaaagatacattgcgagagacggtcgtcctgtgctggtaagtttgcttgttttacttttgacctcttttaagatctttcaactctggagcctggaaacatggtgatgcaggaggcaagttctctctattttacatcctttcttctctgtatcttatgacatttgcctcttattctgtgcagataccttcgagtcccattgcacttctcaagagcaatatcctttcagcgcaatctaaggtcgttttatgttaagacatacttgatgctgagagtttattgaattcttaaccttcttcttattttttttttatttttttagcaaaaggtaagtatattgcatttaccaaaaaacagtatgtacaccaccacagcagccatgtcagaatctagaaataccaccgaaaaaatcctacacccaaccagagacagttatattatatcctactcctaagtttctgtacccaatttacatcaatattggtccatttacaagatatttttataattcacagaagcacatcagttttaattagtttaataatgacctctggatgaataaccaactcagaccatatagccttattcctggctttccggaagttgtacgccagagcagcaagcacagcaatgcaaacctgtttcttatacctccttttatgtgtcttagcccatctcttatagctagtgaagatacagtcgtgtgcacaggattgaaccccaatccaactagcgaaagcctcacaacattatgactataaatacatctgaagtataaatgctgcacctttttctcctcttgcctgcacggtatcagaacaaatcccagctttagctaacaattccctggttttcagtttattcaatgccatcatgcaagcaatgaaagaatgttttggaacattcagtttgttccaaacacagtgagagcaagggacctttcctgcagttccacttagccacttatatccctgactaatagtatgactctttgcaccgtaaattgatttcaacttaactttttcataagcagtgaattgtgtgttgttagagtgtctagctgtctaggagattgggagaaaaggagggaccaaggagatagaaacacacctttgtgtttctttgtgtatttactttttagggtgggtcacgttttctgagaaatttgggaaaaggaagaaatagtaacacactttcccatttgtataacctgtatactggagctccaatataatttgcatttttttttgagctgcaagaatatgttgacaaacagttattgcttcttcctcagctacaacttatgttggagccattcctttggagaaaacgctatgcttctaagatttctgatgagcatgctcaggaaaggtaatgtcaagacatgtgttacctcgccttaattttcgttccaggaggtgagcatgcatttagaactaaaaggcacaaagactgttggtggtcttgcctgttcaaatataatggagaggagttttcgctacatttaccctctcttgaagtggggttgaaatatagcatcaagttgaatgcttgattaagtttaaaggacttgtgtaactctttttctgtttactgtgattacatgacctggttgattaacataatggtctgtttatctgtagtgtgggtgagttttttgagcgacattttgggaaagaggtaatggtttaccatagtatttctgctttagtggtaaattgtaatgttgctgataattatacttcgctgcagtttgttgattatctaattgatccttttgtcgcgggtacaagtggaggagatcctcagtctctttctgtaagtgaacattttgtgcttcactcccaattttttggaggctggaaatagattcttttccagttgttctgtcaaaaatagatgtagctttattttgaatttgaagttcccaattgttcattttgactattactgattattgctaagagtggcattatgctattatgctcctaaaagaaaggtgaattttgacctacatatagtataatgtatcaatattggtttaattgtttgttcttttgttccttttggtgctcatcttgcgccttgttctcatcgctcgttttttcatgttgcacttgatttaaatttgctcagcttaacttgtctttttgaatttatattacttattgctatattttactaatttcgttgaaactaattttttgctgaacttttcgttttgttgaaatcatttttctgaattaacttgattttcctgaatagaattgaattttggtgatcttaccttttctgcagccttttatttctttcttgtcctttttccaatctcatttttttatatttccattgtgttgacatcttatcattaactgtgcagatgcgtcatgcatttccagaagtatggaatattgagaacaagtatggaccataagacgtttattttaatcgacatgtatgtttcttagtttatacatatattaattctgtggtaaaaaaaccgaacaagaatatctttttttttttctatcatcaaaaagggtgaatatatgtagaggaaaaagatttgaatcaagatattagcctaaagcaataataatgttagtaatagctttaataacaaattcaaaacgtacattaatgaaccgagaggccggaaaatagttaaagtgaccactaagagaagcgaaggattcatgatgggttttcaacccagtagggcaaatttgttcaatgttctttacaaatcaagcttattaccttgtgggtgtttttgctagagatgaatgatagaattttccctagttggaagtcttttttggttactttatgggagctagtgatgtaatttgtttcgccttatggcatttcctaacatgtgcttttgtgatgtattgaagctttttttttgccttaatttatgctggattttaattttgttctttgtttcatttttcttgcttttgaaaaaaatatatagatatgtatatattaggattggtcgaggattttgagggaagggaaagacctaagaaaacttggatgagggtgattgatagtgatatgagtctatttgggatcgaagaaaatattcctttggataaggtgtagtggagggttgagggagcaaatttatgcagattagcttgacttaaagtttttctttttgattatttttcatttacttgtgttttgcaaacatttactcatgaatgatgtaaacttcttcaaccaaatctctggaaaaaaataatctacatggaaaaaacattattaatgttaacttgacagagatcccatccttgtgaagcagctagcaattaggcatctaacaattgacattttaatggacaggatagaatgtctcttgatagtcaataccctctgtttcattgtatcccatagctactaatctagtttgtatctttccaaagaaccattattttgaagtttcaccttgaacacccattttgaaccaatatgtttcttgcccttggggagaggggctaattgccatgttttgatgcggatgcaaagacacttgttctacctgagcctattgacttgatcatggatactctagggtttgaactcaagggaaagaatcaagtcttggcatgtgtggtgacatggcgtggggatggagtaaagaagagtcatagttctgttaggatatgttcttgcttgctacatagaatcgtagttctgttaggattgctatgatattatatctagtagatagattttatagttaattaggataaacatgtgatgatcatgttataataggcatgtgattagaggataggattagcttaattcttatcttgttgttagtttaattcttatcctagttttatgtttatcttagtcgaagttgtagccatataaagggcgttccattcattaataatacttagttttgctttgtgttttaaacatacttcttgattattgtttgcttgtgagctaactaatcaaaccattaaagacttttcaggagttttagtgctaaacatcttaatttcaggagtgattttaagagcgtttagtgatcttgaatcaagaaatatccttgttcttgttcgactaatatcagtggttttgttcgagttcttggagttaatctcttcaagattcttattcaacttgattgttgagcttattggtttagtaatcatatcaagtggtatcagttttccagggaggagaggatagataggattctctttgatcaacaaagatccaagggctatcaacaaggttcaaacattgctgcttgttcaagacttgatctttttctaccaagatgcattctttacgtcacaaggtagtaataacaagattaagagtggtttttacatccaagaatcaatctttcacgtccaagatttcatctttcacgtctaagattcattctttaagatcaagaaagttataacaagcatagaagaacacataaccatggagtccgagatggacaagcttgccaaagctatgcaagcacttgcaaagtcgcaaactgaatcacagagtcgactcaatgagaatactaccacaatcaatgggattggtagtaacatgaataggttggaggcacgcatggatgccattgcaaccatcatacaaaagaagcttgatcggaatagtgccaacttcataggtgccaattcagaggaagagttggcagaacgtgaagaaagatcatccaagactacatacaatgatgatcgtggcttaaagttggatgactataatggagatagcaatcgagaagacttgttacagtggattcgacaacttgagaaggtatgtgattatagaggctttgatgacaagaaaagattcaggattgcctccataagactcacgaaatatgctggaatttggcttgaaagcttcaaggcacaacgagccaagaaaggtaaagaaaagttgtgtagttggacaaagttgaaagttcaagcttaaagagaagttcttgcctagtgactatgaacaaaaatagttcataagactctctactataagccaagacacgcttagtgtacatgagtacaccatggaatttgacaagctagggcttatatttgacatagaggagaaagaacaatggaagattgcaagatacatcaaaggcttgaaccgccacattgccaagaaggtggaagtatccacttatcacacctttgaggatgtgacaaagttggctaagaagtttgaagaacatgagaaggaagagaagcctaagagttcttacacgcctaagtatgatactaatgctaaggccaaggctagcttcctactcaaagtggtatgaaggacctaagaggctaagaacctcaccccacctaaagaagacacaagagttgagaagcctaaagtcgtcgttccaaaggagaaatttgaagagatgagaaagtgcttcaagtgtcaaggaaggagacacatagcaagcaattgtcctaacaaaagagtcctcaccatgagacaatacctagctttgcaagaagaggaggatgtctattagttcgtccctgatgaagagcaaacttaggggaagaagaggaggaggatgcttttgctgaggatgatgcaaggctagtaggggtcaagaggcgcaccttacatgtcgaccatacacctagcatggagcaaatggaaaaatcttttccacactagatgcaaggtaggtgactatatatgtaatggtataatagatagtggttcttgcactaatgttattgtatctgaggtagtgtcaaagctaaacttagctacaagggcacaccctaagccatacaagttgagtttgctagatgatagcactggcatgagagtaaagaaacaagctttgatttcattctctataggggttataaggatgagttatggggtgatgtattgcctatgagtgcatgtcatctcttgcttggaagaccattgcagtttgataaaaaggtcatccatgagggggactctaatgtgtactctgtgttggttggttctaagagggtatgtttgcatcccttagctcctcattcagtggcgccaaagcaaccacctaagacaccaagttactttctatcttcaagggagttcgaacaagaggtggaggaagaaggttgtgcttatgccttgattgtaagacatgctgccacaagtgtcaagactactagcaatgagaagctcgaagccttgatgaaagagtttgaggatgtctttctagaggaactacgacccttgagaggcatagaacatgctgtagaccttgtacctggcgcccctttgcctaacaagcctgcttataagtgtgatccagtggcatctagggaattgcaacgccaaattgaggacctaattgaaaagggctatttaagggagatcatgagtccatgtgttgtgccagctttactagttcctaagaaagatgacacatggaggatgtgcatagatagtagagcagtgaacaacattacagtcaagtaaaggtttcctatgcctagattggaagatatgttggataagttacatggggcatcaatcttttctaagattgatcttcgaagtggctaccaccaaatgaggatcagagaaggtgatgagtggaaaacaacattcaagaccaagcagggattgtatgagtggatggtgatgccatttgccttatgcaatgcgccaagctctttcatgagcttgatgaatgaggtacttcgtccgttccttaacaagtttgtggttgtttacatagatgatatacatatctatagccaaaatgtggaggaacacttgttgaacttgcgtagcttattcatgaagcttagagagcaccaactctatggtaagattgatggcgacgaggttgacgggggattatggcggcagtgaatcaccctctttgccggtcactgaaatacaacctgaggtatctttaaattctgtaattggattgactaacccaaaaactatgaaattgctgggaaaaattgctggatgtgaagttgtggtgatgattgaccctggggcaacccataattttttatcactagctactgttgagaaattagctattcctgtgtcggaatcggaaggatttggggtttctctaggggatggacaggcggtgaggggtagtggaatttgtagaggggtgttattgagtttaaatggtggagttgaagtggaaacagattttcagcctctgggtcttggtaattcggacgtgattttgggtgtacagtggctggagacgttggggacagtggagagcaattggaaaacacaaacaatggggtttgaaatcgagggtgtcaagttcactttgaaggtgacccatcactggcgaggtctcgaatctcactcaaagccatgatacgtaccttatgtaaagagggtggaggtttgtggcttgagttgaaccagattgagcattatcaggagaaaacaccgcattcatcagccttacctgaaattccagttttcttacagagagtccttacccaatttcagtctgtgtttgctacaccagaaggcttaccaccgataagagaacatgaacatgcaatagttcttagagaagggtgtaatccggtaggggtaataccgtaccgttatccacagttccaaaaagatgagatagagcgcctcatcaaagaaatgttggcttccggaatcatcaatccttccacgagccctttctcgagcccggtgatattagtgaagaagaaagatgggtcgtggcggttttgtgtagactatcgggccctcaataaagaaacggtccccgataagtatcccattcccgtgattgatgaattgttggatgagcttcatggggcaacacttttttcaaaactcgacttaagggccgggtatcaccagatccgggttaaggccgaagacactctcaaaacagcttttcgcactcatgaggggcattacgagtttttagtaatgccatttgggttgacaaacgcgccggcaacgtttcaatcccttatgaacgaggtcttcaaaccattcttgcgcaagtttgtcttggtatttttcgacgatatattggtctacagtagttctgccaggaacatgaggagcatttgaccttggtgttgcacaccctagcagctcataaattgtttgtgaatcagaagaaatgtgattttggcaggtcggaagtagcatatatggggcatatcatctctggtcaaggggtggctgtggatatggagaaggttcaagcgatggtggaatggccccttcctaaaaacctccgggaattacggggatttttgggccttacagggtactaccgcaaattcgtacttcactatgctcatatagccaagcctttaactgatcaactcaagagagatgcgtttgggtggtctgaggcagcaactcaagcctttgaaaagctcaagaaggcgatgatcacatcccctgttttggcaatgccggacttccaagagttgtttgtggttgagaccgacgcatccgggtatggtctgggggcagtgttaatgcaaaacaaccgacccattgccttttacagtaagttgttaggtgcccgggctcaattaaagtcgatctacgaaatggagttgatggccatctgcatggcagttcagaattggagatattatctgctgggtcgacatttcctcattcgtacagaccaacagagtttacgtcatctcactcagcagcgagaagtaagtactgccttccaacgttggatgagtaaacttatggggttcgattttgaaatacagtttaagccggggtgtgccaaccgggtagctgatgcattatcccgcaagacagtgggagaggttgaattgggtgcgctgatattaactcatggggtggactggaccgacttggagcgtgaaattgaaggcgatcctctgttgtgcaaaattaaacaagacttccacgggggtgctattactcctgtgcacttttctttggtggacaacaagctgttgttcaagggtcgatacgtgattcccagctcttcggtttttattcctaccttgctgcgagaatatcacgattctcccattggagggcattcgggggacctcaaaacatatctcaggatggctgccgactggtattggaggggcatgcgcaaggatgtggcgcggtatgtgcaacattgtagcgtgtgtcaacaacaaaaaatgtctcaacagatgccagggggggtactacaaccactccccataccttcctcggtttgggatgacttgtcaatggacttcgtggaaggcttgccatcttccaagggggtaaacaccatcctcgtggtggtcgatcgtttgtctaagtacgcccacttcctcccactacgtcatccatttactgctgtgtcggtggcaaatgtgtttgtcaaagaggtggttcgtttgcatgggtttccttcctccattgtttcagatcgggatcgaatttttatgagtgtgttttggcgggaattatttcgtttacatgacaccacactcaaacgaagtaccgcgtatcatcctcaaacggatggtcagtccgaaatcgtcaatcgagctctggagacttatttgcgttgctttgtgggggaatacccgcgctcttgggctcagtggcttgggccgaattttcatataatacttctcctcatctctctaccaaaatgaccccgtcaaggtcctttatggtagagaccctcctactgtgatacgggttaatcggggagcctcacctgttgaaagcttggaaaacatgctccaagagcgagacgcagtattagatgccttgcagattaatctgattaaagctcaacagaaaatgaagagtagtgctgatgctacaagaagagaggtgcattttaaggtgggagatcgagtgtacttaaaattacagccttaccgtcagaaatctttggcttaacgcccttatgagaagttagccgcccgtttctacggaccatttactattttacagaagattgggcaagctgcatacaagttacaacttcctgtttctagcaaggtgcatccggtgtttcatgtctcccaactgaaacaggccgttggttccattcccgtttcagccactattccagagcaattgtcttctgacttggagttagaggtggaacctgatgaactcctcgatgttcgtagtgtttctagaggccagcacacttacttggaagctctcattcagtggcagggattaccatcattcgaagctacctgggaagatgtggctgctttccatcaccattttccatccttccaccttgaggacaaggtgaaactttgggggggtggtaatgtgatgcaccaaactaccactccactactcacctattagaggcgtaagaaaaagggggtaaatcaggaatagtttacaaattctgttgaaaggaatattttgtaattatgatgtcagaggttgttagcaaaaaggcagtagagtaacaataaaaaggggaagggaggagagaagaaggtattgagatttttgtaaggaacttggcccttgggagagttgggagcctctcgaaagctcaccattatcttgtgaatattttccttcctggttatatacaagaaccttcctctgtcaatttcttttctctctaatcttatttcttattctgttttctggttgccattgtttgaagttgcttgttgtgcttgagtaaatacgtgaagtggtgaaacccatctgaattcatcacatctattccaagtggtataatacaagcttgtaatccaaatctaatgagaaatctaagttatgaagaatttcaaaagaactaagtacccttgttttggatgcccaaggatttacttgccgctcaagttaatgctcaacgtgcaagatacaacctctttagtatcccaaggtagtttccataagaattaattgagctcaaatcaagaacaatatttttatgtattaatgtgaacacttcctgaattatattagatatatggtctgaaggttggaagaaagattagcttttaattttaagtttgagatagtttttagaatcgaggaaagattagctcttaacttgtaaactaaggattgctttataagtaaaacattagttatggaactcttaaaattggttttgaacatttctagttaaaaatcccatgtaattctcccaaactagcttaaaatctcacatttcacaagctaaggagagacaaatggcgttctcttgtgaaacaatctaaaattttcattaggctactgttttcaagtatttatatgttagaagtgccgcatataggtacataaaataagtttacaaacacaagtaggaataaggaaaactaaaagagaaacttcagccatacaaaaccggctgaaatcagctactactttctactttctagcttcaaaatctgattgcaagtctcctttaagccaatcaccaatgaaaacctttcctccacatgaagtgtgctcaaatcaagagaagaaacccatcattcgcctatagctacctgggtcagatgaagatacggcaaaaaaaacgctggaaatcagtgaaccaaaataagcaccaattggatgctttctgtccttgctacattttcttctcataggactacttcaagccatacatgaataagcagttagatccagctcctagcatccatttgatcgtacaaatgagctccaaaaagataagtaaaaccaagcagccaaaacctaattaatactaatgatgaattagttgaatagctaatgacgatgaagcaacactttagtaggaatagtgttaattatgatcaatgctacttaatcttctgattaatttttggaaaaatgtcatatctaccttctgtatacacttattcataactatatcgtattattattatttttaaataactaccttttaagtaccaaaacctaagaaatcaggcacttgatggattccatccaaagatccatttggcggggcccactaactgacttttgattttttgcctttcctcttttggttaatctcaatggttcatcaataacaactcaatcttctccccatttcatcaaatcatccctaaatcagaactttttcaaattcacccaaatgaggttatggaaacctctaccaagtttattcgaccacttttagtctagctcaaagttttacacttgcttcaaaaactaagatttattaactttagaaattaggtttttatttttattttttatttaactttgtaacaatcttaaataactcaggtgctttctagagtttggctttaattgtttttcccttggttatgtgaaagaagtatgactactttctccaagactaaagtagagagcaaaaaatgcaattctggaatttcttgcaaaagaaaaggaacgagttaatgataatgaaaaacaaagaaaatgatgagaagagaggagctgaatcaatcatgatcatgtattttaaagttttttttgctattgaagtgacttaagaagaggaaagaggatgagtgaagacaaacaaaagaaaggataaatagagggaaatcttgggcttagaaaggtgaaaaggtaagaagatgagttagtgggccccaacaaatgtatctttggatataatccgtcatgccactgtttggggcttgcttaagtccatacattacttcactaattttacaaaatttattttcttgaccaagaactgaaaaaaccttcagtggtgatctattaggttttggaagttaaaaggtagttatttaaatgtttttaatataaaaggtagttatttagatatttttaatataaaaggtagttatgtgaataaaagtgtatataaaatgtaattttttgacatttttgccttagtttttcttgctaattcaccttttcaacttgaccaagttgctatgaggagaaaacgagcaattattaagcaaatcgcaacactagcattaatccatggcccatgaaactctccataattagagattggattagcacttagtagaacttcttgctcctgctccaggtttccattacttctttatctaagtgcatcaaaaggttgttgggttatgaaaggtggtggttgtgtatagtcattgtcaaaatgttgttaatgcactctatttagaggatgagggattgaatagttttcacctcgtgacctttcattcctttttaaaaaaattgataatgtgtattggtcctatgactgtatgaatggtaataagctatctcatgagctgttactatcttcctcagagtctaggtagaagggtttgggctgataattttctactatgtgcaattagtttgttggatttggatatgctagttgatataggtcctttcccttgggccttctcttaatataggcctacagtgtgattgaagataaatcttctggagaatataagaacaatgagatggattggttagaggttgatttgttcttttggtgtaagactatttcgggttctctattggttatgttcagacgccagaatatgtgttggtgattgttttccatgaacatactttatccgcagagacatttttcttttttcttcctataagattatatttgtttcctctcttggtgctcatctcagtgtctctactttacgttaaactgttgacattacttgacaatgcgtatatttgtcgcatggtgctcttccctcactccacgtcgaccccatacatcaaaaaatgccattaaagaatattcgaactcacaaccttgtgttgaaagaatggaatccctaccaatgactcattaattcattttctctttaagaaataaatgatttcctcacaaacttttaggctttaagagcccaaaagataaaaacataaaataagatagacatcaacgtcaagattagccttaaatgcacaaagcacatgtcaaatgattgataactactcacgagttgcaactctttgggcgttgcctaatattaattggatctcttttaaaaattgttggtggttatggttggtggagaggaccatgtaacttttagctggtcacaactggtaatgattgtcacttttactgcccataaaaaaatttaaactgttgaatatgtttctggcagtggatctgacaaatcctttacaagttggcgtccattttgttttgccatgtgactcaattataatacgtgagttttattatccaccaggtttggctcactaatttccggattaattcaatctaaactgtctccaaagaaggaaaagggtggaggaggaaagccttcttctaatgaaaagacacgcatacgtggttcgttttctttccagggtggaatgcaggtattagcatgtagctttcattctgttaacatttgtggttcttccagacatacatccaatgctttttttttttcttgctataaccataaacattcttgtcatgaacattctttaatactgttgctgagcttagtgtattcgttcattcatgtaatttcctctcttgaggttaaaatggcatacagccttacaacctatatccataatgctccttagagtagaatccctaggttataacatagtaccacttatcaaaataaacatggcacacactgcaggacaagaagtaaatccacctagagaactgagcacctagtagtaaaagcagcgatacattactaataacagtagcagggccataagagtagtaaatgggcctcatttcaacactccccccgtaatggtgagagagaagaagcagtctgaactcccagcttggagagcaaaatagagtgttgctgaacagggagaaccttagtgaaaacatctggcacttgatcttgagatggaacataggtaggctgaataaccccttcttcatttgtattgtccctcaggaaatgacaatctatgtctacatgcttggttttctcatgatgaactagatatgctgctatggcaagagcagcttggttatcacagtagataggagtagcactggactttttaatgcgaagatctttgaggagttgtttgatccacatcacctcacacacagcaagagccatggatctgtactctgcactgaccacaagaaattgcctctttgactttcaagatacggggggagtcaccaaggagcacacaaaaccagatgtagaatttacaacacccatcccattcactatcacaaaatgctgttagttgagcactagacttgttcgccatgagaattcaccctgttggcagcttgaagatgcacattagtggggcagtgcataaatttgcttaaatcatgtatagtgaaggcaatatcaggcattgccttgtaatagtgagataaatgagcttccccatcaatttttgatacacatcaggttgttgaagaggatcaccattgtcagcatagagcttgacatgtgagtccatacgaagcctcaatcgtctgcaatttataaaaccatattcatcaacaagacccatcacatacttctttagagataaaaacgatacttcactacactgatccacttcaatcctcaaaaaatatcttaggccacccatatctttcatgtgaaattggccagcgaagaaactctttgcttcctcaatagttgctaaactattgccagcaagaatgaggtcgtccacatacaccaatatagcactgaaacagtgagagttttgcttgaagaatagagagtagtcacacttggattaagtgaatacattttgctttaaagcagtgttagcttggcaaaccattgcctcaaagcctacttcaagccataaagtgacttaagcagcttgcacaccttagttcatttggtgtcacttctgccatcagtacttagctccccctctccttgaactttgatcctgttacatgtttcactatatcctggtgatagcttcatgtatacactatcctacaattcaccatgcaaaaaagcatttttaacatccatttgtttgcaagaaccaaccctctaaggatgcaacaacaagcatgtggtcatctttgctacaggggtaaaagtctgctcataatctattccatatctctgtctgtcacccatgattacaagccttggcttatgcctattatttgtgccatcagtgctgtattttgttctgatccatccatgtgagggatggctcatttctacaaaatcctagttccgttaggatttgtgttgttttcctaattctagtaggaataggactcctaaaatcctaatcctcctagttctgttaggagtttaaaagttttagtttgattgtaattctagttgtgttagaaatccaaatcctagattcatgtcacgtatggttagaacatggctagtaggataatttgtcttgtgatgtccatagccttggcatttgtggcacctaactttcaatagcttgtcttctgtctccttttctttctccttctttgaggaatcaacgtttttagagctatctaaaccactagcatcaatattaggtttaaaagtgctaaaagatttcgaatagttcttacttgcatacaatttctttttctagtttatgtagcgtcaccagggaacaaaaactcggccgttccgttctggaacggccgctttgtaacggatttcagagaggccgttccgttaaataccgttctagaacggtgatttggaattcacaccaaactcggcgcgatagcgttacgtaacggtgtaacggcgttccagaaccgttacaatcacataacgtccgttatttgaagaagaccagttcttttggtggaggaagaagaagagccaacgcaagatctatagatctgagttaaaatttgaaaataaaacatgtttttttatttaaattaaagcttacagaggatgtagaactcaaattcgagtaaacccctcctttaatttcattaggttactgcaaatcgaaccctaaattgcaaaccctaatttcgaaaaaaccctaatatgcattgggatgcaacgctgcttctccggtcatggcagagaaggtcgacgagtcatcttcggctgcttttagcactgtagctgccggtggttggcttgtttgcaggttagtgcttgctggttttctttctctcataccgatcatcttcttcttttctctcttctctttttcttttttattgtgtgactgccagtcacgtgataattgcaactcataaagtatctctttctctctcttcttttcatccctttttatttttctttcccttttagtttttattccctcacgtggaatcacctaattttcatccttttttatttttttagttacactcttacacagaagtatgttcaaatatcattatagtacctcaaatattgtatttataagagttttggacataatatgatatagaaagtaaaatagaagaaaaataaagtttaaatgtcacttgtgtgatttttttaaaaaaattcacgccgcgacggccgcgaaacgttctatttcccgttacaagccgttcccgcgataacgcgaccgttcccgcgaacgcgaccgcgaccgcgttttttttccttgagcgtcacatcttgcaagcttcttcaaaggtgagttatgtgtacaactccaatttctctccaatcccctccgtcctcatttaggcctccaaggaagctacttaaacattgatcttcaagttcatcaattttccaaagaatggataacttctcgaactcctttatgtaatcttcaacggacatattcccttgtttaagagtagaccattccatgtacaagctttgtttgtagttagaaggaacaaaacgtcctcttaacaactttttaagcttatcccaagtagagattttgggtttattagctttcacacgctgcctctttactccatccaaccaaatagatgcatatttggttaccttaagcacggccaccttgtatttcttttcttttggtgtctcttaatcccaagtagagcttttgcgtgtgaaagctaataaacacaaaatctctacttgggataatcttcttcttgtttccgaaacaactaattcttatggtagttaggaaagcaagaatggtttctaattcaatagggaatatattaattattattagtttaagttaaatagtgcacgaatctaaatagattattcgtctcaaaatctcacttaagtatagatttgtttggacatctgagggaagaagaagagagcgagataaaggagaattatcactcaatgaatccatatcccgagttttcccatttacttctttgaaagcaatatagttcacgaggtcttattatcagtctatggacataagagtaataatttaagggcaaaaactatgactttatgggtttaaactgatacatgttctgttaaactgatagatgttctgtgttaaaccgatactcatatattcctggttaaactgatagatatatgatttaaattgatacccgtctcagtcatgtcttggattgagacggtctgacacaagactttttgtgtattatatatctgattagaataaatttatcctgtttactaattattttatcttctccagacacttgttgacacaatatgcaatcagtttggtaaagatgaactcaaactacagtgcaaggtcctttcattgtcctacagtcataaggggatcccttcttcagaaaattgggtcgtgtcttctgtgtcaaaaaattccattgaagatcaacaatatgatgctgtcatcgttaccgtgagttttactttgcttactgctattgcaccaatctttcttcttttgacacactgataatggcaatgctgttgtggtttgaagccatgttatggggttttagggatatttatggagtctgatctaatatgttattggataaaattcagatctgtaacgtgactcaatgagattgaaaaaaattgaatcaagataatggattggaaaattaggagctaacctagggtctataagcgatccacttggagtctcataccaagcaggtattcgacattttaggtttatattgctgctatggctcatatgggagcctacatagggtctggtgcttattcctttttcttttgtctagttttggggctgcacatttctgttgtgttttgatatggatagccatcacctgcaattgcatggaggctgaactaagttctataggggagcaaacagtatctgttggaaatttattttcatattgtgtttttaaatgctataatccaaaatttgttgttcccctaaaatgcctaaaatacccttatgtaactgctccatctgtcccttaatagacttcccatttctccaatgcatgtttgccaatacacattttgtattgttaatatcaaaaattacatattagtaaaaattataaaagtttgattttcctaatgtacgcaatgagacgaatcaaacaagacgccatatgactatgttttttcttatacttcctatgttttttaataagtgacatgttttccttttagggaaatgtcacaataagtgacacatagctcaaagtagtaaaaatacttctcatttattacatctttgccattatttaattgtttcacctacctactttatccaatactcaaatttgattggttgaacaattggtcccaactttctctagactccttggtattccctttcccccactttctctctgtgtcacttattaaaaaatggaggacgtatattggaaaaaaattggaaggttttcttcacttatgaatagtggtaaaattagagatgggaaggctattttgggatggatggagtaatatttaaatttttaaaataatgtcattgttttagtgatgaaataaaattcaaggctattttttctagtaattatgttatctgtacatcaccacacgtatcgcgtgcatataagactagtttgatgatattccaacactgttcgaaggaagtcaggcatggaaccatgtttgcttccatatgggaaatattttgcttactctccttcaaacatctacctcattatcccagaatgattgatcgaatctaatacaaatatacaattgatcatatgccaccagggaattacatcaaattaaatttttatagaaggggaatcagtcatagcctcatagggaacgaataagtgatactcgccagtttctttcctggttacttttcctcttctcactagccatcctttatgtatgggtatgctgcatcattcctgccactggttgggactcccgtttgaactatggggggatgggaaagctaagccatcatcttcaaattgagtttcttgagaatgtaagacaccatctgtaagatgaatatagtgcactctatagtcaatgtcatgatctttatgggtttatctgctgaaataactgtgatatacccagctctccatttacaaagttttcctacatattaaactcttgcccgcaattctagaacttcattgtagaacttttcctacataagcatcatttgtcttttctgtagtaaaagttagaaagagctttattttagaacattcgtttttagttttctttgttgttgattactccgccacttttaatacttttatgattcaagtatttgacaaaatcatgtaatttaggtcctctgctgcatgcagtctataccctctctctctctctctctctctctctctctgtggttgtgtcttacttgttgagttactaactccagccattacataaagtaggctggcattatgatgagcaaattactcaagaccacatgttagctcctttttcttttctccttattctgaaaggcaaatataggtccatcttggtgcttctcatgtcataagtaagctgaccccctccttttccagggaataggacaataatccaaaagtgagggttttacatgttgggatttgtgaagtttcttattttacttaatagccgagtcagtgttacaatacatagtaccgtgttacaaaatagtatgtaacaccaagcatgtttatgtgcaaaattgtgcaagactttgttgctggcacgccaagggctgttttaatgtagtttacttattcttttaggtttttcagatgacaatcataaagggaattaggagtgtttttattgtagtcaatccctattgtgctacaacgataaaagaaaaaagcacaagactagaaggagaagtaatgtctaggaaagactcctcacctggggttgctagtcacctacacatcttagaaggcatcaaaccaaagcttattcccctcgactgttttcgggagaaaagaagacaaaattgtttctaacttatactttaccagtttcactacagcatcagaaagaagcaaaatatgctcccacaacacggcgaacctagctttccagatgtgataaaccagaccagcaaaatgattattttcactagagctttgagtctattttttcggtttttccccttcttcctggtaatgtcacgccaccaagccatcatctcaattttttgagatttgacgtaatcgctcaaatagctgagtaagacacttcttgctctaaatactaataaaaaagaggtgaatgtgggtctcagccatgttactcaaatcggataaagtgtctactcttattagggtttttgggtgttggactcatccatttttttttgtaaaatgtcaagattttggtttgaaatgagagattcaagtgtcgtgacatgagtcggcacgcaacacttaaacgtgtcgaagtaacagagggtctcagacaatcaactttaatcaatcacgaaccccaaaatttatgcaacctttgctcatattcagtctctgtaaagcactcaactgcagcacacccacccattcgcttcacctacagcaggagggcacccaagtaattgctatgatgagcgaattattctgttttgccttgctggaatattgctgttagatttgctgactcactggcagttaattatagtcagagaatgagaaatatcctgtagagagagaaagggtatcttttgtatttagctctataaatagctaaggaagggaagggcattgagagtttatgatattataataggagagatttagcctctcgaatgctgataggagcgtagctcttgttggattatcaatactactctgtttgctctatctatttctactcaggttccttcttgtacagtggatccctgattggatttacttcatcaaccagcagataaaattatttgtaggcacattgaaaccattccaaacctaatgaggccaaagtttatcacaaagaatataggagccaaatgtaggcaacagataagagtataattgccagaagttgaagactccaggtattgttcagaaaccttaatgcatatcatcattctgacactagattttccccggagccaactaacaaaaatgaattaaagagattaaggctatgtttagttcacctgaaattttctgatctgaacttatctgatctgatctgaacttattttttctgatctgatctgatctgatctgaaccaatctgattacaagatcttatcttttagatttttctcaatatataagaaaaaatatagtcatgtggggtcttgtttgattcgtctcaatgagtactttattaatattcaattattataatttttactaatatgtaatgaaagatataatgatttttaaatataagcatgatctgaactgatctgatgtgaacttattttttctgatctgatctgatctgattagatctgaaataagcaaaaataaggtgaactgaacatagcctaagcaacaattgagggaaaataagatcattatggctaagataagataaatatgtaatgataaaatcagagtaattatatcagttacactctcaacattcgtcagattgaggtttcctcccaaaatgccaacccacttttctgtattttcacgtccttctctctacccttctaggtatatattacatcagctgtaaaatttttgaaccaactagtagaatactgatctaccctcaactgcctcactttctcattttttctgggcctttttctctctagcacaagtccacataagtgatgcatagcagaaatataattccactagtcatcctcaatattgatataacaaacacatcacccacatattatcatttttaatcgctgcatgcgaggcatacttacccaccaatcaggatatgcataacagcgttcctaattccaaaaccaccatatatcttgggtttgcaactctcatccctagcaacaaggggactttctgaaaaagtggcagattccgcccacaagtagtttgtacggacacctttattatattattaatatcatatttcggcaacacaaattaccagcccagtaaaacatgaattgacatgagactaacaaggggcccaatctaatatcgtacgtctgtactaagcaatgtataaaaaaaagctcaaggtgcattgatgcaatagggatcctaatgtgcataggtgcgcctcattgaagtgaggcaccactaaggataaataaaaaagattgatgtaaaattaaattgtgcaccttgggtgcgcctcgatgaactttttttgtgtgcctaagtgtacctcaagtacgcctcattgatatcgcctcgcctggcagaaaacgagcttgaccccaatcgccttgctccccaccgcctaggcgtgcctcagtcacactttttaaatacattggtattaagtactcagaatggcaaaaagaaactttgggcattaattagacatttcactttttgtgcaactatttgtgacttcagagattgatatgttttctacattacagacttttgtgatggctgcatggtctccactgtcaaagaacattagtttaagtagaagaaatattgctctattaccttcctccctctacaaacaaaatcctaaaatgtggttatgtagtgccaattcaaacttgtagatgcatgactaatgctttcattatgctgtgggtttttatactatgattcatgtccaattacataacaattagctggagtcaggatatgtcacggaaattttaagcctggcaggatgattgtttatattttctctttttcggtgtttaagtcaaagtaaacttctaggctgctcttttataggctagttgggctgttggggagatctacacattaagtgtgaagaaatcttgtctaactccagtttggttgagaactgtaagctgtcataacatttgttgcatgatgaggccttgtgggattatcatgttagctgtaaactctaaacttacttgaaatctagtgttgtgtctccttatttctgtagtcaaaattgaaccttctgtacgtttttgatacctgcgactagaatgatggaattctgaattactgatactattacaaccatctgctaagaacgaagatgactcttagctaatttctcagcagatttagagaaattaagaagaattactaatgaatatttaaagagaaaactaccaagatatgattgtattgatgaaaaacaccaattacaacctaaccaacattcgagaggttggagctctcccaagtaaccatttctctcactaaacttatcaattttcaagatgccttttccattctcagttcctctatatttatactactccccttagcaaactacccaacttattccccaagtaaactaaagagataatatctaaaatacccttccccctacaataatattagttcttagcattaccggccccctaaacttccaccttgtcctcaaggtgggtcgtaatcatcactaaattctgggcctctactcgtatattcagtgtcttgcagcccttcaggccccaagcctaggttatgcagctcgtgttgcggctcctcctcatatagttctctggctggagtgagtgcctcaactataatgaaaaagtcctggaggtggggaaggaaggagtgtctgaaatggtgtggtgtgctgctggtgttatgggcttgtgcctgaaagttttgggtttaaagagatggagtggagaagagtggagaagtgactggagacgtaaaagaaggaatcataatttttgtaagtggtgggttgaaaaagttggtgggaagaattgtttttataaaatgtagtgtaatggtcgaaaaatgggtggagtaagtatggtttttggctggggatgtggtactgggttgaaaataaataggtctgagcttacttgtaaaattggcctcaacatgagcaggcccaatatcttgagccaattccccaaaagctggcaatagagcactcttaattgcattgttgtgggccatcgggctccaaacatatattcggaggagccggacttctttggtgatgtcattagcttggcccattgcacactttcccttaacagcctcaagatcttttcccacttttgtaccccaaccacgtggcttcaccatcctttctttcttgcttttgtcacttttttggcaatatacgagtttgtccttactaccctcatcttctaatgttggcttcctcaccaagcttaatttctggaattttgtccaccaaatcccaccacccatcgtcaacaccatacctatctacaccggccaagaagcctggtcctccacccgaattttcgccacagacaaagcctgaacaaccgtcagttctctcaccggagaagttcacaggtccaccacctgacccactagttgctgatccacccttcacaaatctccctcctctggctgccacaagtagtggttcctccgtaatactcatatttctcgtccaagagccctggaccaccaccggacccacttccaccggcaccaacttgttcaaatgatacttctctttcttttccaaacagcctacttggactggaaaaaccactgcgattgtagcctccgccagatctgtagcctagtgcacctaacgtgcttccaactgcaacccaatagggatggaaatggatgggattcggggagggtggagcatcacccgcatccgtcacccgcatccattcgctccacccgctccacccgcatccatccatccgtcacccacgggtgaaacgggtgggtcggtgataaacgggtggaaccatttagggggtgtttggtatcatgtttttttacaaaagaaacagaatcaagtaacaaaatccgtttctacttgtttggttctatgttgctcagactcgagtacccatgtccgacacgggtacgtgtccaagtgtccaactcagctattttctagaattttttatattttttaacccaaaacaaagtgtccaagtgtcccacccatgtccgactcccgaggatccgacacgggtacttgaggtgaaatgaagagtccgagcaacggaggtttggttagtgtgtaaagtaacaattaccgttacttgaggaaaacacatccccccaagttgtttccattcaaaaacctaaggaaacaaataacgtttcactcctcaaacaagaggaaagggaatgggttatatttatttccattccattaggataccaaacaactaataagggtaacacttattattatcctttcccctccttatcaaaatcctttccattccgtttacggtattcataccaaacacccccttagtatattttctaatgaaatttgtgatatgatatgcatgatataaaataattctatcaaaaatataaaaagtaagtaaacttacatgtacaacttaatagatgggtgatgggttggaggttaaacgagtgatggatcgggtgacgggtgaagaaattctcacccaccactcgctttccatccatttaaattaggtttttcatccatttaaaaaaccgggttaaacaggtgatgtatgatccatcacccatttccatcctcaaacacatcccgatttgtttactgcaccaccagatccaccagtataaccacccgaaaaatcatcatgccttctactagccttgtaacctgctcccggtgagaagcttcttccacaagtggtggtcgctggacctccatctccttcttccccaaaaaattttccatgacacccactcgacccttcatctgtgacaacctcttcttcgtccacctctgaagttttggggtcgtcttcctcctcaagctcctcttgaagtaactttaacttccgttggatgggagagaacgcttcattgattatcttcaccagatcttcttgaagtttctcgaaactttttctcacgttttcctctacctctttcgtgatttcctttccgatctccttcatttttagactaggagctcttgcgattccatggcagatttctttttttaaaacaagaaaatcaggcacttaatctcccagaatagtggtgctctgataccattttctaagaaccaagatgactcttagctaatttctcagcataacaacaaatttagagaaattaagaagaattactaatgaatatttaaagagaaaactactaagatatgattgtattgatgaaaaacaccgattacaacctaaccaagaggttggagctctcccaagtaaccatttctctcactaaacttatcaattttcaagatgccgtttactactccccttagcaaactacccaacttattccccaataaactaaagagataatatctaaaatacccttccccctacaatattagttcttagcaccatcaaactgggatggatggttttgtaaggttccaatttacttctccatcaaaatattttaggattttttatctcatgtattttagagtttcctcgtccctttttatctgataagattcttctgatgatttgattttatggtaggctccaatcagcaatattaaagaactgaagattctgaaagctggagttccattttcacttgacttcattccagaggtttgtatttttatagtggttagacatgcttcccctagttttcaaagtaaaagcatccttgttgtgacgatattttttcccttgtttttgtttttattattatcatcacttatttccattttctattttccatgctgataagatgttcatcaccataatcttgtggtatcagaagtgtttagtggagtttattcactacacatgcagttgttcttttgccatgaccgccattcattttctcgtcaaaacaaatctatgaagtttggttttcagactcatggttcttgtagctcttgtgaatttttttttcttctccttgcatgcattcttcaaattacatattgcatataccaggtgctctcctttattttatatttaatttttaaaattctatcatatattttttaatgtcaaacctcaaactaggggttcactgcatcttaggcttaccaggctaatatttctttacttaaccttttccctttatatttgctatcctcttgtgtagtaatcaccataagaagggtacaaactaaattaccctcccattcttttgtatcattctgaaatagtgtcacagagctttgatttttttgccctcatttaatctggcaaatgttctctctatttttttttttttactttcttttgacgggattctcaggcaattgttacggggagcagccagtcacactgtttctgtttattatgcaggtgagttacctgcccctctctgttatgattactgcgtttaagaagaccagcgttacaagacctcttgagggcttcggagttcttatcccttcgaatgagcaacataatggactgaagactctcggtaattgtctggttcacgtgtgtagcgaatcagattttcaaacgctgattccgcaatattgcagctactctgttttcatctatgatgtttccagatcgtgctttctccgatatgtatctctatactacctttgttggaggaagcagaaatagagaacttgcaaaagcttcaacgtatgagatatgcaatgttttaaatgtatgctatagtcatcgtttcaaccttttggtgcctttttcttactaatttatcctcctggtttaatgatcttagggatgaattggagcaaatagtttcgtctgatctccaccagctgttgggcactgagggaaaacctacttttgtgaagtattgatatctttcacccaacttaacatgatttgtgcttataatatgttaaataaagtaactgaaatcctgaaattaagactacgaaactgtatggtgacagtcatttttactggaacaatgcattccctttatatgggcacaattacgactcagttctgagagcaatagaaaagatggaaagagatcttcctggacttttttacgcaggtaatctgtcatttgcttgttgcgataaagttcatgtacagttggcatatcaatcaacttgcattctttcttgctaactccaaacaatcaggatcattaacttgtaggctgcagcaacagagagtatctcccaagttgttaggtttcatgtaacctcgtcgctgagatgaaatttccgttggctaaaaagtgaaagttttgtattgatgttacccaaaacaaaagtattttgcatgttgcttgaagttttggttgtttcagatagtacatcctttgacatgaaaataaatggaaaagcgtatgtcaagcaattatcatctagtttctttgtttctagatactagccgcatttgatcccagatcatttttgaggaagtcagctgaaataccgtagctatccttcagttttcataataaaactttaatggatctgatgtacagtaatttagtgtgcaccgggttaataattgatattaacttcatatagtgagtcttataaagatataatgaacttatatacaatatagtggattttattaatggaaaacatatagtgaaactatatgcaatatagtatgatacataaagacttagacaacaagagcattcgaaattacaaagaacaaaggaaagaacaattgtatcaaaccggttcgaatgaacaaacaaccaccacttccacaatcaatgtaccaccaatcaagactaaactataacaatgagcttctagtttaagtctactttgagttttaatcaccaattcaacgattagatgatcaaaattgcaaaggttaagagttggtcaaacctaaccaagagttacactaggcacatagctttgttaggagtatattagtttatgaattctagttaagttagaaatccaatacctagttggattaggattcctaattggattagaattatagtttagttagaattctagtaatagtaggcgtgtgattaggagatataattagcttaattcttatattgttagtttaattcttatcctcgttttaggtttatctttagtcgaacttgtaccctatataaggggcctttatttcattaataatatagtttattttgagtttaaacctttacttgtgattgtttgcttgagaggttattaatcgaaccattaataacttttcaggattgttaagtttttagtgttaaacatcttaatttcaggagtgattttaagagtgtttagattcttgtattcaagtttcaggactgatcttgaatcaagaaatatccctagtttcgactaatatcataagtagttcgaattcttggagtcttttcttcaagattcatattcataacttgattatttagacttcttggttttgtaatcatatcaagtggtatcagttttccagggaggagaggatacaaagggttctctttgatcaaagaagatccaagggcatcaataagaatgacacttgcaataagttcgagtgatacaaacaacttcaagactcgatcttttgctaccaagaaccaatcttgacgcctgaagattgttaggacaaaggataagaagtgtttctacatccaagattgcattctttacgtccaagattgcgtcaagatccattctttaagttcaagaaaggagtagaaagcattcgaacactacttaaacatgacatccgagatggataagctggctatggccatgagtgccttggcacaatcacaaactgagtcacgcaaccacatgggtaggatggaggcacgtgaccgtggattgaaactagatgactatagtggagatggcaatccagaagacttgttggagtggatttgccaactaggcaaagtgagtgattataggggctttgatcacaagaagagattcaaggttgcttccattaggctcacgaagtatgctggaatacggctcgaaggattgcatgcacaaacttcttgcctaatgactatgaacaaaaacagttcataaggctcgcatcaataagccaaaacacacttagtgtacacgaatacagcatggagtttgacaaattagggcttatatgtgacatagaagagaaagagcaatacaagattgcaatgtacattaaagggttgaatcgatatatagccaagaagatcgaagtctcaacttatcacttctttgaggatgtgactaaattggctaagaaattcgaagagcatgacaaagaagaagggcctaagagttcttacacacctaagtatgactctagtgctaaagggaaatcaacagttccctactcaaggtggtcggaaagacctaagaaccccactacacctaaggaggacactagcatggagaagacaaaagtggccgtacctaaggagagtttaattttgtgttttatacatctttgcttaagagcttaacaattgaaactattaataacttttcaggatggttaagtttttagtgttaaacatcttaatttcaggagtgattttaagagtatttagattcttgtattcaagtttcaggagtgatcttgaatcaagaaatatccccttgttcaactattataattgatcttattcgagttcttggagttaatttcttcaagattcatattcatacttgattattagacttcttggtttagtaatcatatcaatatcattagcattaatttacccccagggagattaagaaaggattagcctaatcaaggcgcttaagaagtttttaggaaaaatcgtgcttgttaagcttaagaattgaacttctttcaccatttgcccttgattctcttgttgaactagaagatcttggttcatagtagatgctcctgcatcatagtagagcatttaattttaattttttaacatgcacgaagatgtaggtagtgtagtatatatcgtgagacgtggtttaacatatagaaagatgtagtttctgcatgatatagtgagtttttgcatgatatagtgaatgtctgaatgatacagtggatcgttccgaattgttgtagtttgtatgatatagtatttttgtgaatgatatagtgagtttcttcatgatacaatgggtttctgaatgatatagtggattgcttagaaatgatatagtgagcttttgtatcatgtagtaggtttctatgtgatataggttgttaaaagatgatacatgcttttggcctcatgtactctaatgttaacgtgaacccggtccttgcaagtcaattgcagttttttcaatattaagctatttttttttttttttttttttttttttttttttttttgtacgggaatatttagcatctttaccacaaacataaccatacgaatattatgcggaaattccagtctgaagtcttaacttttcaaaattaaaagcttctatattatttttggaatgaaaaaaaatgagctatggcatgttattttgaaatacaatgagtctcaaggtgcatagtggcttcaattctacgaataatgaatggactactgatttctaattttttgttccgggcttttgcattaggtaaccataaagatggactctctgtgggaagaactatttcctctggatacaaagctgcggagcttgtgatatcctatctcaactctacttaagatgcctaaatgatcgaggagactccgtaagtcctttctctgattctatctttgaactgagtggaaacacgactgtggtctaaagtagttgatgtctcagatatccagaaatggcgttagtgatattcaggagctgtccattgaccctttgattcattgttgcagtttactgaaagttgttagctggtctcagaaaaacgaaaggaaaaaagggggaaaacaaaaacaaagaaacgtagattgtggtgttaaaatcaagaattccagagatttgtaccttctttatcagttgaattgtttacagtgtgaatcaagaagttagctcgaccttcttttcttgtgaatggtaagatttcgtgatcatcaatacttgattgtgctgtttgcaacttcaacggtaagatttcctgatcttacagtttaattgcttgtgctgtttgccactt

SEQ ID NO: 100 - DNA, 37009 bp, synthetic construct
  source 1..37009: mol_type = other DNA
tattccatcgaatgtagcaaattgactgtccgttgcaatttcggagtttccactcgtcgcatggtaaatggtaatgctatacgattctcacctctcaggagtctcaactcatcttcaactatcgcaggcatttcccaggaagaacccattaatggccaaagtgtctgagccgggtaaacccagtaagtcaaacattcgaatcacaactcaagcaaatttgtcttgtttgcgttatattttgctcatttcagccttttttgtttttccgacctttgcatactgaatattgtgtgtgtgtgtgtgtggggtttcagcttctgctaaaaggattgctgttgttggtgctggtgttaggtaaattttcgtctcttgcagagtttttgagtcatttgggaattctatgtgaaacttgtaactcccttcagtccaacgaacgcagtacaattttctatcaaatcatggtcctaatttccaattttccatatatattgttggaattatattgggattgtctatcactattaatagtattaggatcaattgtagagaagcacagaaatttttgggatcgaaagaatatctggattgccacattaacagcagatataattcttccaattggtttttggttcttcctaccttgacttgtctggtcaaacattataaactttaacctttaatatccattaaagtaaactataggatttttttgtctaaaacatgcttatataacatgaaatttgtgagaaaccaccttatatatatttttttgcgaaaacaaaccttaaacaaaattattatcgtgagaacaaaccttatgccaatttcgatcattgacccaaggttttggcattgaccgtgtcatgaattttgttgggtttaaaaagtcatgtgtcttgcatacgaaatggtaaatgcgggaaccttgggtcaatgtttggaatccgcataaggtttgttctcccaaaaaatgtttttgttcaaggtttgtttttgcaaaaaaacttatataaggtgctttctcagaaatttcatgttttataaagtagtatttgacaaaaaaccctaaaatatattatagaattattattgactaaattgtgtaaaaatgtactcttctaaaagtacattatagtattttagtggaacatttgcgagaaactactttataaatacgatttttgcgagaaatttcctaataaaaaaatgtgaagtgcaaaactatcttattgataattttctactccctcaaatccaaaatactatgaagtctttcctttctggtttgtcccagattagtttgtacgcttccatctttggtatgatcccacttttattatacttattagttttacgtgagttccttactctatctcttttaacaaaaatactcaactatctctatccaataaaaagttccttactagtcctatcacatctgctttttaataaaataacgtttgataaccacacaacttatatccttaaaatacacgttcaaccaagtgttgagattaatttggacggagggaataaatattttttgaggcatattggtagcagtattcggattccgataggttgactatgtttccaatgttgaccaacacttgccttgcatgtaattctaactttgctcttttttattcttcatttccctcgtattccatatacaatgtttagagacccattccttcctcttctcttctttcccttccttactatgctttgccataatcttcctcaaatgagtgcaaattaatttgtcgttgatgtaggccaactgattgtagcacatcttcatagttcatacctcaacacactcgtaattatattataccctacatgttaaatggctcatgaagctttattttatatcatacttcctccgtttcacaataagtgtaacacttttcttatttggaataatcacaataagtgaaaccaagctccaaatggtaagaaaagttcactcttattacaaatataccaccaaaaagtaagaggggatcacaacttcaatacttcttcactctactttattgtggtcccaactttctctctctaaattccttggtaactccccactttctctatgtttcacttatggtgaaatggaggaagtattttgtagtggtatttagctactaggccttggatgatatacaatcatacaatgtatttatattcacgataatttgctgcccaccttgattaccatgatttccaccaattttatcaatttcagtacttcaccaccccgaatttatattttttatttccaaccttggtatctccatttgtctgagtgcccgatccatttgtatcgcctccagaattgaagaagcttcctgcagctagacaattaggaaggttaaaaaagtttggagatggtggaggatagccataataatcattgttgggaggtggaacttggaaggttattgtagggttgaagtccttgatgaagaagaattgagttcaaatgagaggaaaaaggagcagggaagagggacaataagaaaaaaaagggtaaactaaaatcacgtgtaaggcatgtgcagatcaacatcagaaagcatagtcaacctactggtattagggcactgatacctttttgggtcaaaatttttttacaaggtatttcatgaggtagttttgtccatttttttttttacaaggtatcgtctcattttttttttatcatttagtttctcgcaataagtgtatttcatgaggtagttttttccaaaatttcctcatttattataaaatacctcatcttttccataaataatgcaatgtctagacttttacgctgtttacacatgctcctttgaccatctattgacacacaaggaaaaatagagtagagtcatgcaggatcttgttagatttttctcgatatatactttcaaaagatcaatttttttataattttttttttgaggggattttttttttataattatgtacttatcaaaggtcaaagttgtgcaccgggaagcataaaactctatgtgttgcaatttacatggaaggggaggagtataataagagaaaattatggtaaaaggttcattcctggagatcatgagaaaggaagtagaaagaacaaaaaagaacaatgggagtgcttttcaatgtttgttgtacgtagcatttattcatttgctataatgttttgtgacattgtagtggacttgctgccgcatataagctaaagtcccatggcttgagtgtgacattgtttgaagctgatactagagctggaggaaaactcaaaactgttgcaaaggatggtttgatttgggatgagggggcaaatactatggtaatgtttttgattattgcaggtcttgcactttagcgcacaattaatttctggatttttttttgtactgtggtggttatggtcatcaacatgtctcacccactgtgcttgcagatagagagtgaagcggaggtcacgagtttactcgatgatcttgggcttcgtgagaagcagcagtttgtaagtctttcattatctgaatggcacatactttatttcgaaagattgtaattgccttttctttctagatggcttcatcttcatgttgctttctgattcagtttcgtggctaactttccaagtttgtctgattgctaactctgtcatagccaattgcacaaaacaaaagatacattgcgagagacggtcgtcctgtgctggtaagtttgcttgttttacttttgacctcttttaagatctttcaactctggagcctggaaacatggtgatgcaggaggcaagttctctctattttacatcctttcttctctgtatcttatgacatttgcctcttattctgtgcagataccttcgagtcccattgcacttctcaagagcaatatcctttcagcgcaatctaaggtcgttttatgttaagacatacttgatgctgagagtttattgaattcttaaccttcttcttattttttttttatttttttagcaaaaggtaagtatattgcatttaccaaaaaacagtatgtacaccaccacagcagccatgtcagaatctagaaataccaccgaaaaaatcctacacccaaccagagacagttatattatatcctactcctaagtttctgtacccaatttacatcaatattggtccatttacaagatatttttataattcacagaagcacatcagttttaattagtttaataatgacctctggatgaataaccaactcagaccatatagccttattcctggctttccggaagttgtacgccagagcagcaagcacagcaatgcaaacctgtttcttatacctccttttatgtgtcttagcccatctcttatagctagtgaagatacagtcgtgtgcacaggattgaaccccaatccaactagcgaaagcctcacaacattatgactataaatacatctgaagtataaatgctgcacctttttctcctcttgcctgcacggtatcagaacaaatcccagctttagctaacaattccctggttttcagtttattcaatgccatcatgcaagcaatgaaagaatgttttggaacattcagtttgttccaaacacagtgagagcaagggacctttcctgcagttccacttagccacttatatccctgactaatagtatgactctttgcaccgtaaattgatttcaacttaactttttcataagcagtgaattgtgtgttgttagagtgtctagctgtctaggagattgggagaaaaggagggaccaaggagatagaaacacacctttgtgtttctttgtgtatttactttttagggtgggtcacgttttctgagaaatttgggaaaaggaagaaatagtaacacactttcccatttgtataacctgtatactggagctccaatataatttgcatttttttttgagctgcaagaatatgttgacaaacagttattgcttcttcctcagctacaacttatgttggagccattcctttggagaaaacgctatgcttctaagatttctgatgagcatgctcaggaaaggtaatgtcaagacatgtgttacctcgccttaattttcgttccaggaggtgagcatgcatttagaactaaaaggcacaaagactgttggtggtcttgcctgttcaaatataatggagaggagttttcgctacatttaccctctcttgaagtggggttgaaatatagcatcaagttgaatgcttgattaagtttaaaggacttgtgtaactctttttctgtttactgtgattacatgacctggttgattaacataatggtctgtttatctgtagtgtgggtgagttttttgagcgacattttgggaaagaggtaatggtttaccatagtatttctgctttagtggtaaattgtaatgttgctgataattatacttcgctgcagtttgttgattatctaattgatccttttgtcgcgggtacaagtggaggagatcctcagtctctttctgtaagtgaacattttgtgcttcactcccaattttttggaggctggaaatagattcttttccagttgttctgtcaaaaatagatgtagctttattttgaatttgaagttcccaattgttcattttgactattactgattattgctaagagtggcattatgctattatgctcctaaaagaaaggtgaattttgacctacatatagtataatgtatcaatattggtttaattgtttgttcttttgttccttttggtgctcatcttgcgccttgttctcatcgctcgttttttcatgttgcacttgatttaaatttgctcagcttaacttgtctttttgaatttatattacttattgctatattttactaatttcgttgaaactaattttttgctgaacttttcgttttgttgaaatcatttttctgaattaacttgattttcctgaatagaattgaattttggtgatcttaccttttctgcagccttttatttctttcttgtcctttttccaatctcatttttttatatttccattgtgttgacatcttatcattaactgtgcagatgcgtcatgcatttccagaagtatggaatattgagaacaagtatggaccataagacgtttattttaatcgacatgtatgtttcttagtttatacatatattaattctgtggtaaaaaaaccgaacaagaatatctttttttttttctatcatcaaaaagggtgaatatatgtagaggaaaaagatttgaatcaagatattagcctaaagcaataataatgttagtaatagctttaataacaaattcaaaacgtacattaatgaaccgagaggccggaaaatagttaaagtgaccactaagagaagcgaaggattcatgatgggttttcaacccagtagggcaaatttgttcaatgttctttacaaatcaagcttattaccttgtgggtgtttttgctagagatgaatgatagaattttccctagttggaagtcttttttggttactttatgggagctagtgatgtaatttgtttcgccttatggcatttcctaacatgtgcttttgtgatgtattgaagctttttttttgccttaatttatgctggattttaattttgttctttgtttcatttttcttgcttttgaaaaaaatatatagatatgtatatattaggattggtcgaggattttgagggaagggaaagacctaagaaaacttggatgagggtgattgatagtgatatgagtctatttgggatcgaagaaaatattcctttggataaggtgtagtggagggttgagggagcaaatttatgcagattagcttgacttaaagtttttctttttgattatttttcatttacttgtgttttgcaaacatttactcatgaatgatgtaaacttcttcaaccaaatctctggaaaaaaataatctacatggaaaaaacattattaatgttaacttgacagagatcccatccttgtgaagcagctagcaattaggcatctaacaattgacattttaatggacaggatagaatgtctcttgatagtcaataccctctgtttcattgtatcccatagctactaatctagtttgtatctttccaaagaaccattattttgaagtttcaccttgaacacccattttgaaccaatatgtttcttgcccttggggagaggggctaattgccatgttttgatgcggatgcaaagacacttgttctacctgagcctattgacttgatcatggatactctagggtttgaactcaagggaaagaatcaagtcttggcatgtgtggtgacatggcgtggggatggagtaaagaagagtcatagttctgttaggatatgttcttgcttgctacatagaatcgtagttctgttaggattgctatgatattatatctagtagatagattttatagttaattaggataaacatgtgatgatcatgttataataggcatgtgattagaggataggattagcttaattcttatcttgttgttagtttaattcttatcctagttttatgtttatcttagtcgaagttgtagccatataaagggcgttccattcattaataatacttagttttgctttgtgttttaaacatacttcttgattattgtttgcttgtgagctaactaatcaaaccattaaagacttttcaggagttttagtgctaaacatcttaatttcaggagtgattttaagagcgtttagtgatcttgaatcaagaaatatccttgttcttgttcgactaatatcagtggttttgttcgagttcttggagttaatctcttcaagattcttattcaacttgattgttgagcttattggtttagtaatcatatcaagtggtatcagttttccagggaggagaggatagataggattctctttgatcaacaaagatccaagggctatcaacaaggttcaaacattgctgcttgttcaagacttgatctttttctaccaagatgcattctttacgtcacaaggtagtaataacaagattaagagtggtttttacatccaagaatcaatctttcacgtccaagatttcatctttcacgtctaagattcattctttaagatcaagaaagttataacaagcatagaagaacacataaccatggagtccgagatggacaagcttgccaaagctatgcaagcacttgcaaagtcgcaaactgaatcacagagtcgactcaatgagaatactaccacaatcaatgggattggtagtaacatgaataggttggaggcacgcatggatgccattgcaaccatcatacaaaagaagcttgatcggaatagtgccaacttcataggtgccaattcagaggaagagttggcagaacgtgaagaaagatcatccaagactacatacaatgatgatcgtggcttaaagttggatgactataatggagatagcaatcgagaagacttgttacagtggattcgacaacttgagaaggtatgtgattatagaggctttgatgacaagaaaagattcaggattgcctccataagactcacgaaatatgctggaatttggcttgaaagcttcaaggcacaacgagccaagaaaggtaaagaaaagttgtgtagttggacaaagttgaaagttcaagcttaaagagaagttcttgcctagtgactatgaacaaaaatagttcataagactctctactataagccaagacacgcttagtgtacatgagtacaccatggaatttgacaagctagggcttatatttgacatagaggagaaagaacaatggaagattgcaagatacatcaaaggcttgaaccgccacattgccaagaaggtggaagtatccacttatcacacctttgaggatgtgacaaagttggctaagaagtttgaagaacatgagaaggaagagaagcctaagagttcttacacgcctaagtatgatactaatgctaaggccaaggctagcttcctactcaaagtggtatgaaggacctaagaggctaagaacctcaccccacctaaagaagacacaagagttgagaagcctaaagtcgtcgttccaaaggagaaatttgaagagatgagaaagtgcttcaagtgtcaaggaaggagacacatagcaagcaattgtcctaacaaaagagtcctcaccatgagacaatacctagctttgcaagaagaggaggatgtctattagttcgtccctgatgaagagcaaacttaggggaagaagaggaggaggatgcttttgctgaggatgatgcaaggctagtaggggtcaagaggcgcaccttacatgtcgaccatacacctagcatggagcaaatggaaaaatcttttccacactagatgcaaggtaggtgactatatatgtaatggtataatagatagtggttcttgcactaatgttattgtatctgaggtagtgtcaaagctaaacttagctacaagggcacaccctaagccatacaagttgagtttgctagatgatagcactggcatgagagtaaagaaacaagctttgatttcattctctataggggttataaggatgagttatggggtgatgtattgcctatgagtgcatgtcatctcttgcttggaagaccattgcagtttgataaaaaggtcatccatgagggggactctaatgtgtactctgtgttggttggttctaagagggtatgtttgcatcccttagctcctcattcagtggcgccaaagcaaccacctaagacaccaagttactttctatcttcaagggagttcgaacaagaggtggaggaagaaggttgtgcttatgccttgattgtaagacatgctgccacaagtgtcaagactactagcaatgagaagctcgaagccttgatgaaagagtttgaggatgtctttctagaggaactacgacccttgagaggcatagaacatgctgtagaccttgtacctggcgcccctttgcctaacaagcctgcttataagtgtgatccagtggcatctagggaattgcaacgccaaattgaggacctaattgaaaagggctatttaagggagatcatgagtccatgtgttgtgccagctttactagttcctaagaaagatgacacatggaggatgtgcatagatagtagagcagtgaacaacattacagtcaagtaaaggtttcctatgcctagattggaagatatgttggataagttacatggggcatcaatcttttctaagattgatcttcgaagtggctaccaccaaatgaggatcagagaaggtgatgagtggaaaacaacattcaagaccaagcagggattgtatgagtggatggtgatgccatttgccttatgcaatgcgccaagctctttcatgagcttgatgaatgaggtacttcgtccgttccttaacaagtttgtggttgtttacatagatgatatacatatctatagccaaaatgtggaggaacacttgttgaacttgcgtagcttattcatgaagcttagagagcaccaactctatggtaagattgatggcgacgaggttgacgggggattatggcggcagtgaatcaccctctttgccggtcactgaaatacaacctgaggtatctttaaattctgtaattggattgactaacccaaaaactatgaaattgctgggaaaaattgctggatgtgaagttgtggtgatgattgaccctggggcaacccataattttttatcactagctactgttgagaaattagctattcctgtgtcggaatcggaaggatttggggtttctctaggggatggacaggcggtgaggggtagtggaatttgtagaggggtgttattgagtttaaatggtggagttgaagtggaaacagattttcagcctctgggtcttggtaattcggacgtgattttgggtgtacagtggctggagacgttggggacagtggagagcaattggaaaacacaaacaatggggtttgaaatcgagggtgtcaagttcactttgaaggtgacccatcactggcgaggtctcgaatctcactcaaagccatgatacgtaccttatgtaaagagggtggaggtttgtggcttgagttgaaccagattgagcattatcaggagaaaacaccgcattcatcagccttacctgaaattccagttttcttacagagagtccttacccaatttcagtctgtgtttgctacaccagaaggcttaccaccgataagagaacatgaacatgcaatagttcttagagaagggtgtaatccggtaggggtaataccgtaccgttatccacagttccaaaaagatgagatagagcgcctcatcaaagaaatgttggcttccggaatcatcaatccttccacgagccctttctcgagcccggtgatattagtgaagaagaaagatgggtcgtggcggttttgtgtagactatcgggccctcaataaagaaacggtccccgataagtatcccattcccgtgattgatgaattgttggatgagcttcatggggcaacacttttttcaaaactcgacttaagggccgggtatcaccagatccgggttaaggccgaagacactctcaaaacagcttttcgcactcatgaggggcattacgagtttttagtaatgccatttgggttgacaaacgcgccggcaacgtttcaatcccttatgaacgaggtcttcaaaccattcttgcgcaagtttgtcttggtatttttcgacgatatattggtctacagtagttctgccaggaacatgaggagcatttgaccttggtgttgcacaccctagcagctcataaattgtttgtgaatcagaagaaatgtgattttggcaggtcggaagtagcatatatggggcatatcatctctggtcaaggggtggctgtggatatggagaaggttcaagcgatggtggaatggccccttcctaaaaacctccgggaattacggggatttttgggccttacagggtactaccgcaaattcgtacttcactatgctcatatagccaagcctttaactgatcaactcaagagagatgcgtttgggtggtctgaggcagcaactcaagcctttgaaaagctcaagaaggcgatgatcacatcccctgttttggcaatgccggacttccaagagttgtttgtggttgagaccgacgcatccgggtatggtctgggggcagtgttaatgcaaaacaaccgacccattgccttttacagtaagttgttaggtgcccgggctcaattaaagtcgatctacgaaatggagttgatggccatctgcatggcagttcagaattggagatattatctgctgggtcgacatttcctcattcgtacagaccaacagagtttacgtcatctcactcagcagcgagaagtaagtactgccttccaacgttggatgagtaaacttatggggttcgattttgaaatacagtttaagccggggtgtgccaaccgggtagctgatgcattatcccgcaagacagtgggagaggttgaattgggtgcgctgatattaactcatggggtggactggaccgacttggagcgtgaaattgaaggcgatcctctgttgtgcaaaattaaacaagacttccacgggggtgctattactcctgtgcacttttctttggtggacaacaagctgttgttcaagggtcgatacgtgattcccagctcttcggtttttattcctaccttgctgcgagaatatcacgattctcccattggagggcattcgggggacctcaaaacatatctcaggatggctgccgactggtattggaggggcatgcgcaaggatgtggcgcggtatgtgcaacattgtagcgtgtgtcaacaacaaaaaatgtctcaacagatgccagggggggtactacaaccactccccataccttcctcggtttgggatgacttgtcaatggacttcgtggaaggcttgccatcttccaagggggtaaacaccatcctcgtggtggtcgatcgtttgtctaagtacgcccacttcctcccactacgtcatccatttactgctgtgtcggtggcaaatgtgtttgtcaaagaggtggttcgtttgcatgggtttccttcctccattgtttcagatcgggatcgaatttttatgagtgtgttttggcgggaattatttcgtttacatgacaccacactcaaacgaagtaccgcgtatcatcctcaaacggatggtcagtccgaaatcgtcaatcgagctctggagacttatttgcgttgctttgtgggggaatacccgcgctcttgggctcagtggcttgggccgaattttcatataatacttctcctcatctctctaccaaaatgaccccgtcaaggtcctttatggtagagaccctcctactgtgatacgggttaatcggggagcctcacctgttgaaagcttggaaaacatgctccaagagcgagacgcagtattagatgccttgcagattaatctgattaaagctcaacagaaaatgaagagtagtgctgatgctacaagaagagaggtgcattttaaggtgggagatcgagtgtacttaaaattacagccttaccgtcagaaatctttggcttaacgcccttatgagaagttagccgcccgtttctacggaccatttactattttacagaagattgggcaagctgcatacaagttacaacttcctgtttctagcaaggtgcatccggtgtttcatgtctcccaactgaaacaggccgttggttccattcccgtttcagccactattccagagcaattgtcttctgacttggagttagaggtggaacctgatgaactcctcgatgttcgtagtgtttctagaggccagcacacttacttggaagctctcattcagtggcagggattaccatcattcgaagctacctgggaagatgtggctgctttccatcaccattttccatccttccaccttgaggacaaggtgaaactttgggggggtggtaatgtgatgcaccaaactaccactccactactcacctattagaggcgtaagaaaaagggggtaaatcaggaatagtttacaaattctgttgaaaggaatattttgtaattatgatgtcagaggttgttagcaaaaaggcagtagagtaacaataaaaaggggaagggaggagagaagaaggtattgagatttttgtaaggaacttggcccttgggagagttgggagcctctcgaaagctcaccattatcttgtgaatattttccttcctggttatatacaagaaccttcctctgtcaatttcttttctctctaatcttatttcttattctgttttctggttgccattgtttgaagttgcttgttgtgcttgagtaaatacgtgaagtggtgaaacccatctgaattcatcacatctattccaagtggtataatacaagcttgtaatccaaatctaatgagaaatctaagttatgaagaatttcaaaagaactaagtacccttgttttggatgcccaaggatttacttgccgctcaagttaatgctcaacgtgcaagatacaacctctttagtatcccaaggtagtttccataagaattaattgagctcaaatcaagaacaatatttttatgtattaatgtgaacacttcctgaattatattagatatatggtctgaaggttggaagaaagattagcttttaattttaagtttgagatagtttttagaatcgaggaaagattagctcttaacttgtaaactaaggattgctttataagtaaaacattagttatggaactcttaaaattggttttgaacatttctagttaaaaatcccatgtaattctcccaaactagcttaaaatctcacatttcacaagctaaggagagacaaatggcgttctcttgtgaaacaatctaaaattttcattaggctactgttttcaagtatttatatgttagaagtgccgcatataggtacataaaataagtttacaaacacaagtaggaataaggaaaactaaaagagaaacttcagccatacaaaaccggctgaaatcagctactactttctactttctagcttcaaaatctgattgcaagtctcctttaagccaatcaccaatgaaaacctttcctccacatgaagtgtgctcaaatcaagagaagaaacccatcattcgcctatagctacctgggtcagatgaagatacggcaaaaaaaacgctggaaatcagtgaaccaaaataagcaccaattggatgctttctgtccttgctacattttcttctcataggactacttcaagccatacatgaataagcagttagatccagctcctagcatccatttgatcgtacaaatgagctccaaaaagataagtaaaaccaagcagccaaaacctaattaatactaatgatgaattagttgaatagctaatgacgatgaagcaacactttagtaggaatagtgttaattatgatcaatgctacttaatcttctgattaatttttggaaaaatgtcatatctaccttctgtatacacttattcataactatatcgtattattattatttttaaataactaccttttaagtaccaaaacctaagaaatcaggcacttgatggattccatccaaagatccatttggcggggcccactaactgacttttgattttttgcctttcctcttttggttaatctcaatggttcatcaataacaactcaatcttctccccatttcatcaaatcatccctaaatcagaactttttcaaattcacccaaatgaggttatggaaacctctaccaagtttattcgaccacttttagtctagctcaaagttttacacttgcttcaaaaactaagatttattaactttagaaattaggtttttatttttattttttatttaactttgtaacaatcttaaataactcaggtgctttctagagtttggctttaattgtttttcccttggttatgtgaaagaagtatgactactttctccaagactaaagtagagagcaaaaaatgcaattctggaatttcttgcaaaagaaaaggaacgagttaatgataatgaaaaacaaagaaaatgatgagaagagaggagctgaatcaatcatgatcatgtattttaaagttttttttgctattgaagtgacttaagaagaggaaagaggatgagtgaagacaaacaaaagaaaggataaatagagggaaatcttgggcttagaaaggtgaaaaggtaagaagatgagttagtgggccccaacaaatgtatctttggatataatccgtcatgccactgtttggggcttgcttaagtccatacattacttcactaattttacaaaatttattttcttgaccaagaactgaaaaaaccttcagtggtgatctattaggttttggaagttaaaaggtagttatttaaatgtttttaatataaaaggtagttatttagatatttttaatataaaaggtagttatgtgaataaaagtgtatataaaatgtaattttttgacatttttgccttagtttttcttgctaattcaccttttcaacttgaccaagttgctatgaggagaaaacgagcaattattaagcaaatcgcaacactagcattaatccatggcccatgaaactctccataattagagattggattagcacttagtagaacttcttgctcctgctccaggtttccattacttctttatctaagtgcatcaaaaggttgttgggttatgaaaggtggtggttgtgtatagtcattgtcaaaatgttgttaatgcactctatttagaggatgagggattgaatagttttcacctcgtgacctttcattcctttttaaaaaaattgataatgtgtattggtcctatgactgtatgaatggtaataagctatctcatgagctgttactatcttcctcagagtctaggtagaagggtttgggctgataattttctactatgtgcaattagtttgttggatttggatatgctagttgatataggtcctttcccttgggccttctcttaatataggcctacagtgtgattgaagataaatcttctggagaatataagaacaatgagatggattggttagaggttgatttgttcttttggtgtaagactatttcgggttctctattggttatgttcagacgccagaatatgtgttggtgattgttttccatgaacatactttatccgcagagacatttttcttttttcttcctataagattatatttgtttcctctcttggtgctcatctcagtgtctctactttacgttaaactgttgacattacttgacaatgcgtatatttgtcgcatggtgctcttccctcactccacgtcgaccccatacatcaaaaaatgccattaaagaatattcgaactcacaaccttgtgttgaaagaatggaatccctaccaatgactcattaattcattttctctttaagaaataaatgatttcctcacaaacttttaggctttaagagcccaaaagataaaaacataaaataagatagacatcaacgtcaagattagccttaaatgcacaaagcacatgtcaaatgattgataactactcacgagttgcaactctttgggcgttgcctaatattaattggatctcttttaaaaattgttggtggttatggttggtggagaggaccatgtaacttttagctggtcacaactggtaatgattgtcacttttactgcccataaaaaaatttaaactgttgaatatgtttctggcagtggatctgacaaatcctttacaagttggcgtccattttgttttgccatgtgactcaattataatacgtgagttttattatccaccaggtttggctcactaatttccggattaattcaatctaaactgtctccaaagaaggaaaagggtggaggaggaaagccttcttctaatgaaaagacacgcatacgtggttcgttttctttccagggtggaatgcaggtattagcatgtagctttcattctgttaacatttgtggttcttccagacatacatccaatgctttttttttttcttgctataaccataaacattcttgtcatgaacattctttaatactgttgctgagcttagtgtattcgttcattcatgtaatttcctctcttgaggttaaaatggcatacagccttacaacctatatccataatgctccttagagtagaatccctaggttataacatagtaccacttatcaaaataaacatggcacacactgcaggacaagaagtaaatccacctagagaactgagcacctagtagtaaaagcagcgatacattactaataacagtagcagggccataagagtagtaaatgggcctcatttcaacactccccccgtaatggtgagagagaagaagcagtctgaactcccagcttggagagcaaaatagagtgttgctgaacagggagaaccttagtgaaaacatctggcacttgatcttgagatggaacataggtaggctgaataaccccttcttcatttgtattgtccctcaggaaatgacaatctatgtctacatgcttggttttctcatgatgaactagatatgctgctatggcaagagcagcttggttatcacagtagataggagtagcactggactttttaatgcgaagatctttgaggagttgtttgatccacatcacctcacacacagcaagagccatggatctgtactctgcactgaccacaagaaattgcctctttgactttcaagatacggggggagtcaccaaggagcacacaaaaccagatgtagaatttacaacacccatcccattcactatcacaaaatgctgttagttgagcactagacttgttcgccatgagaattcaccctgttggcagcttgaagatgcacattagtggggcagtgcataaatttgcttaaatcatgtatagtgaaggcaatatcaggcattgccttgtaatagtgagataaatgagcttccccatcaatttttgatacacatcaggttgttgaagaggatcaccattgtcagcatagagcttgacatgtgagtccatacgaagcctcaatcgtctgcaatttataaaaccatattcatcaacaagacccatcacatacttctttagagataaaaacgatacttcactacactgatccacttcaatcctcaaaaaatatcttaggccacccatatctttcatgtgaaattggccagcgaagaaactctttgcttcctcaatagttgctaaactattgccagcaagaatgaggtcgtccacatacaccaatatagcactgaaacagtgagagttttgcttgaagaatagagagtagtcacacttggattaagtgaatacattttgctttaaagcagtgttagcttggcaaaccattgcctcaaagcctacttcaagccataaagtgacttaagcagcttgcacaccttagttcatttggtgtcacttctgccatcagtacttagctccccctctccttgaactttgatcctgttacatgtttcactatatcctggtgatagcttcatgtatacactatcctacaattcaccatgcaaaaaagcatttttaacatccatttgtttgcaagaaccaaccctctaaggatgcaacaacaagcatgtggtcatctttgctacaggggtaaaagtctgctcataatctattccatatctctgtctgtcacccatgattacaagccttggcttatgcctattatttgtgccatcagtgctgtattttgttctgatccatccatgtgagggatggctcatttctacaaaatcctagttccgttaggatttgtgttgttttcctaattctagtaggaataggactcctaaaatcctaatcctcctagttctgttaggagtttaaaagttttagtttgattgtaattctagttgtgttagaaatccaaatcctagattcatgtcacgtatggttagaacatggctagtaggataatttgtcttgtgatgtccatagccttggcatttgtggcacctaactttcaatagcttgtcttctgtctccttttctttctccttctttgaggaatcaacgtttttagagctatctaaaccactagcatcaatattaggtttaaaagtgctaaaagatttcgaatagttcttacttgcatacaatttctttttctagtttatgtagcgtcaccagggaacaaaaactcggccgttccgttctggaacggccgctttgtaacggatttcagagaggccgttccgttaaataccgttctagaacggtgatttggaattcacaccaaactcggcgcgatagcgttacgtaacggtgtaacggcgttccagaaccgttacaatcacataacgtccgttatttgaagaagaccagttcttttggtggaggaagaagaagagccaacgcaagatctatagatctgagttaaaatttgaaaataaaacatgtttttttatttaaattaaagcttacagaggatgtagaactcaaattcgagtaaacccctcctttaatttcattaggttactgcaaatcgaaccctaaattgcaaaccctaatttcgaaaaaaccctaatatgcattgggatgcaacgctgcttctccggtcatggcagagaaggtcgacgagtcatcttcggctgcttttagcactgtagctgccggtggttggcttgtttgcaggttagtgcttgctggttttctttctctcataccgatcatcttcttcttttctctcttctctttttcttttttattgtgtgactgccagtcacgtgataattgcaactcataaagtatctctttctctctcttcttttcatccctttttatttttctttcccttttagtttttattccctcacgtggaatcacctaattttcatccttttttatttttttagttacactcttacacagaagtatgttcaaatatcattatagtacctcaaatattgtatttataagagttttggacataatatgatatagaaagtaaaatagaagaaaaataaagtttaaatgtcacttgtgtgatttttttaaaaaaattcacgccgcgacggccgcgaaacgttctatttcccgttacaagccgttcccgcgataacgcgaccgttcccgcgaacgcgaccgcgaccgcgttttttttccttgagcgtcacatcttgcaagcttcttcaaaggtgagttatgtgtacaactccaatttctctccaatcccctccgtcctcatttaggcctccaaggaagctacttaaacattgatcttcaagttcatcaattttccaaagaatggataacttctcgaactcctttatgtaatcttcaacggacatattcccttgtttaagagtagaccattccatgtacaagctttgtttgtagttagaaggaacaaaacgtcctcttaacaactttttaagcttatcccaagtagagattttgggtttattagctttcacacgctgcctctttactccatccaaccaaatagatgcatatttggttaccttaagcacggccaccttgtatttcttttcttttggtgtctcttaatcccaagtagagcttttgcgtgtgaaagctaataaacacaaaatctctacttgggataatcttcttcttgtttccgaaacaactaattcttatggtagttaggaaagcaagaatggtttctaattcaatagggaatatattaattattattagtttaagttaaatagtgcacgaatctaaatagattattcgtctcaaaatctcacttaagtatagatttgtttggacatctgagggaagaagaagagagcgagataaaggagaattatcactcaatgaatccatatcccgagttttcccatttacttctttgaaagcaatatagttcacgaggtcttattatcagtctatggacataagagtaataatttaagggcaaaaactatgactttatgggtttaaactgatacatgttctgttaaactgatagatgttctgtgttaaaccgatactcatatattcctggttaaactgatagatatatgatttaaattgatacccgtctcagtcatgtcttggattgagacggtctgacacaagactttttgtgtattatatatctgattagaataaatttatcctgtttactaattattttatcttctccagacacttgttgacacaatatgcaatcagtttggtaaagatgaactcaaactacagtgcaaggtcctttcattgtcctacagtcataaggggatcccttcttcagaaaattgggtcgtgtcttctgtgtcaaaaaattccattgaagatcaacaatatgatgctgtcatcgttaccgtgagttttactttgcttactgctattgcaccaatctttcttcttttgacacactgataatggcaatgctgttgtggtttgaagccatgttatggggttttagggatatttatggagtctgatctaatatgttattggataaaattcagatctgtaacgtgactcaatgagattgaaaaaaattgaatcaagataatggattggaaaattaggagctaacctagggtctataagcgatccacttggagtctcataccaagcaggtattcgacattttaggtttatattgctgctatggctcatatgggagcctacatagggtctggtgcttattcctttttcttttgtctagttttggggctgcacatttctgttgtgttttgatatggatagccatcacctgcaattgcatggaggctgaactaagttctataggggagcaaacagtatctgttggaaatttattttcatattgtgtttttaaatgctataatccaaaatttgttgttcccctaaaatgcctaaaatacccttatgtaactgctccatctgtcccttaatagacttcccatttctccaatgcatgtttgccaatacacattttgtattgttaatatcaaaaattacatattagtaaaaattataaaagtttgattttcctaatgtacgcaatgagacgaatcaaacaagacgccatatgactatgttttttcttatacttcctatgttttttaataagtgacatgttttccttttagggaaatgtcacaataagtgacacatagctcaaagtagtaaaaatacttctcatttattacatctttgccattatttaattgtttcacctacctactttatccaatactcaaatttgattggttgaacaattggtcccaactttctctagactccttggtattccctttcccccactttctctctgtgtcacttattaaaaaatggaggacgtatattggaaaaaaattggaaggttttcttcacttatgaatagtggtaaaattagagatgggaaggctattttgggatggatggagtaatatttaaatttttaaaataatgtcattgttttagtgatgaaataaaattcaaggctattttttctagtaattatgttatctgtacatcaccacacgtatcgcgtgcatataagactagtttgatgatattccaacactgttcgaaggaagtcaggcatggaaccatgtttgcttccatatgggaaatattttgcttactctccttcaaacatctacctcattatcccagaatgattgatcgaatctaatacaaatatacaattgatcatatgccaccagggaattacatcaaattaaatttttatagaaggggaatcagtcatagcctcatagggaacgaataagtgatactcgccagtttctttcctggttacttttcctcttctcactagccatcctttatgtatgggtatgctgcatcattcctgccactggttgggactcccgtttgaactatggggggatgggaaagctaagccatcatcttcaaattgagtttcttgagaatgtaagacaccatctgtaagatgaatatagtgcactctatagtcaatgtcatgatctttatgggtttatctgctgaaataactgtgatatacccagctctccatttacaaagttttcctacatattaaactcttgcccgcaattctagaacttcattgtagaacttttcctacataagcatcatttgtcttttctgtagtaaaagttagaaagagctttattttagaacattcgtttttagttttctttgttgttgattactccgccacttttaatacttttatgattcaagtatttgacaaaatcatgtaatttaggtcctctgctgcatgcagtctataccctctctctctctctctctctctctctctctgtggttgtgtcttacttgttgagttactaactccagccattacataaagtaggctggcattatgatgagcaaattactcaagaccacatgttagctcctttttcttttctccttattctgaaaggcaaatataggtccatcttggtgcttctcatgtcataagtaagctgaccccctccttttccagggaataggacaataatccaaaagtgagggttttacatgttgggatttgtgaagtttcttattttacttaatagccgagtcagtgttacaatacatagtaccgtgttacaaaatagtatgtaacaccaagcatgtttatgtgcaaaattgtgcaagactttgttgctggcacgccaagggctgttttaatgtagtttacttattcttttaggtttttcagatgacaatcataaagggaattaggagtgtttttattgtagtcaatccctattgtgctacaacgataaaagaaaaaagcacaagactagaaggagaagtaatgtctaggaaagactcctcacctggggttgctagtcacctacacatcttagaaggcatcaaaccaaagcttattcccctcgactgttttcgggagaaaagaagacaaaattgtttctaacttatactttaccagtttcactacagcatcagaaagaagcaaaatatgctcccacaacacggcgaacctagctttccagatgtgataaaccagaccagcaaaatgattattttcactagagctttgagtctattttttcggtttttccccttcttcctggtaatgtcacgccaccaagccatcatctcaattttttgagatttgacgtaatcgctcaaatagctgagtaagacacttcttgctctaaatactaataaaaaagaggtgaatgtgggtctcagccatgttactcaaatcggataaagtgtctactcttattagggtttttgggtgttggactcatccatttttttttgtaaaatgtcaagattttggtttgaaatgagagattcaagtgtcgtgacatgagtcggcacgcaacacttaaacgtgtcgaagtaacagagggtctcagacaatcaactttaatcaatcacgaaccccaaaatttatgcaacctttgctcatattcagtctctgtaaagcactcaactgcagcacacccacccattcgcttcacctacagcaggagggcacccaagtaattgctatgatgagcgaattattctgttttgccttgctggaatattgctgttagatttgctgactcactggcagttaattatagtcagagaatgagaaatatcctgtagagagagaaagggtatcttttgtatttagctctataaatagctaaggaagggaagggcattgagagtttatgatattataataggagagatttagcctctcgaatgctgataggagcgtagctcttgttggattatcaatactactctgtttgctctatctatttctactcaggttccttcttgtacagtggatccctgattggatttacttcatcaaccagcagataaaattatttgtaggcacattgaaaccattccaaacctaatgaggccaaagtttatcacaaagaatataggagccaaatgtaggcaacagataagagtataattgccagaagttgaagactccaggtattgttcagaaaccttaatgcatatcatcattctgacactagattttccccggagccaactaacaaaaatgaattaaagagattaaggctatgtttagttcacctgaaattttctgatctgaacttatctgatctgatctgaacttattttttctgatctgatctgatctgatctgaaccaatctgattacaagatcttatcttttagatttttctcaatatataagaaaaaatatagtcatgtggggtcttgtttgattcgtctcaatgagtactttattaatattcaattattataatttttactaatatgtaatgaaagatataatgatttttaaatataagcatgatctgaactgatctgatgtgaacttattttttctgatctgatctgatctgattagatctgaaataagcaaaaataaggtgaactgaacatagcctaagcaacaattgagggaaaataagatcattatggctaagataagataaatatgtaatgataaaatcagagtaattatatcagttacactctcaacattcgtcagattgaggtttcctcccaaaatgccaacccacttttctgtattttcacgtccttctctctacccttctaggtatatattacatcagctgtaaaatttttgaaccaactagtagaatactgatctaccctcaactgcctcactttctcattttttctgggcctttttctctctagcacaagtccacataagtgatgcatagcagaaatataattccactagtcatcctcaatattgatataacaaacacatcacccacatattatcatttttaatcgctgcatgcgaggcatacttacccaccaatcaggatatgcataacagcgttcctaattccaaaaccaccatatatcttgggtttgcaactctcatccctagcaacaaggggactttctgaaaaagtggcagattccgcccacaagtagtttgtacggacacctttattatattattaatatcatatttcggcaacacaaattaccagcccagtaaaacatgaattgacatgagactaacaaggggcccaatctaatatcgtacgtctgtactaagcaatgtataaaaaaaagctcaaggtgcattgatgcaatagggatcctaatgtgcataggtgcgcctcattgaagtgaggcaccactaaggataaataaaaaagattgatgtaaaattaaattgtgcaccttgggtgcgcctcgatgaactttttttgtgtgcctaagtgtacctcaagtacgcctcattgatatcgcctcgcctggcagaaaacgagcttgaccccaatcgccttgctccccaccgcctaggcgtgcctcagtcacactttttaaatacattggtattaagtactcagaatggcaaaaagaaactttgggcattaattagacatttcactttttgtgcaactatttgtgacttcagagattgatatgttttctacattacagacttttgtgatggctgcatggtctccactgtcaaagaacattagtttaagtagaagaaatattgctctattaccttcctccctctacaaacaaaatcctaaaatgtggttatgtagtgccaattcaaacttgtagatgcatgactaatgctttcattatgctgtgggtttttatactatgattcatgtccaattacataacaattagctggagtcaggatatgtcacggaaattttaagcctggcaggatgattgtttatattttctctttttcggtgtttaagtcaaagtaaacttctaggctgctcttttataggctagttgggctgttggggagatctacacattaagtgtgaagaaatcttgtctaactccagtttggttgagaactgtaagctgtcataacatttgttgcatgatgaggccttgtgggattatcatgttagctgtaaactctaaacttacttgaaatctagtgttgtgtctccttatttctgtagtcaaaattgaaccttctgtacgtttttgatacctgcgactagaatgatggaattctgaattactgatactattacaaccatctgctaagaacgaagatgactcttagctaatttctcagcagatttagagaaattaagaagaattactaatgaatatttaaagagaaaactaccaagatatgattgtattgatgaaaaacaccaattacaacctaaccaacattcgagaggttggagctctcccaagtaaccatttctctcactaaacttatcaattttcaagatgccttttccattctcagttcctctatatttatactactccccttagcaaactacccaacttattccccaagtaaactaaagagataatatctaaaatacccttccccctacaataatattagttcttagcattaccggccccctaaacttccaccttgtcctcaaggtgggtcgtaatcatcactaaattctgggcctctactcgtatattcagtgtcttgcagcccttcaggccccaagcctaggttatgcagctcgtgttgcggctcctcctcatatagttctctggctggagtgagtgcctcaactataatgaaaaagtcctggaggtggggaaggaaggagtgtctgaaatggtgtggtgtgctgctggtgttatgggcttgtgcctgaaagttttgggtttaaagagatggagtggagaagagtggagaagtgactggagacgtaaaagaaggaatcataatttttgtaagtggtgggttgaaaaagttggtgggaagaattgtttttataaaatgtagtgtaatggtcgaaaaatgggtggagtaagtatggtttttggctggggatgtggtactgggttgaaaataaataggtctgagcttacttgtaaaattggcctcaacatgagcaggcccaatatcttgagccaattccccaaaagctggcaatagagcactcttaattgcattgttgtgggccatcgggctccaaacatatattcggaggagccggacttctttggtgatgtcattagcttggcccattgcacactttcccttaacagcctcaagatcttttcccacttttgtaccccaaccacgtggcttcaccatcctttctttcttgcttttgtcacttttttggcaatatacgagtttgtccttactaccctcatcttctaatgttggcttcctcaccaagcttaatttctggaattttgtccaccaaatcccaccacccatcgtcaacaccatacctatctacaccggccaagaagcctggtcctccacccgaattttcgccacagacaaagcctgaacaaccgtcagttctctcaccggagaagttcacaggtccaccacctgacccactagttgctgatccacccttcacaaatctccctcctctggctgccacaagtagtggttcctccgtaatactcatatttctcgtccaagagccctggaccaccaccggacccacttccaccggcaccaacttgttcaaatgatacttctctttcttttccaaacagcctacttggactggaaaaaccactgcgattgtagcctccgccagatctgtagcctagtgcacctaacgtgcttccaactgcaacccaatagggatggaaatggatgggattcggggagggtggagcatcacccgcatccgtcacccgcatccattcgctccacccgctccacccgcatccatccatccgtcacccacgggtgaaacgggtgggtcggtgataaacgggtggaaccatttagggggtgtttggtatcatgtttttttacaaaagaaacagaatcaagtaacaaaatccgtttctacttgtttggttctatgttgctcagactcgagtacccatgtccgacacgggtacgtgtccaagtgtccaactcagctattttctagaattttttatattttttaacccaaaacaaagtgtccaagtgtcccacccatgtccgactcccgaggatccgacacgggtacttgaggtgaaatgaagagtccgagcaacggaggtttggttagtgtgtaaagtaacaattaccgttacttgaggaaaacacatccccccaagttgtttccattcaaaaacctaaggaaacaaataacgtttcactcctcaaacaagaggaaagggaatgggttatatttatttccattccattaggataccaaacaactaataagggtaacacttattattatcctttcccctccttatcaaaatcctttccattccgtttacggtattcataccaaacacccccttagtatattttctaatgaaatttgtgatatgatatgcatgatataaaataattctatcaaaaatataaaaagtaagtaaacttacatgtacaacttaatagatgggtgatgggttggaggttaaacgagtgatggatcgggtgacgggtgaagaaattctcacccaccactcgctttccatccatttaaattaggtttttcatccatttaaaaaaccgggttaaacaggtgatgtatgatccatcacccatttccatcctcaaacacatcccgatttgtttactgcaccaccagatccaccagtataaccacccgaaaaatcatcatgccttctactagccttgtaacctgctcccggtgagaagcttcttccacaagtggtggtcgctggacctccatctccttcttccccaaaaaattttccatgacacccactcgacccttcatctgtgacaacctcttcttcgtccacctctgaagttttggggtcgtcttcctcctcaagctcctcttgaagtaactttaacttccgttggatgggagagaacgcttcattgattatcttcaccagatcttcttgaagtttctcgaaactttttctcacgttttcctctacctctttcgtgatttcctttccgatctccttcatttttagactaggagctcttgcgattccatggcagatttctttttttaaaacaagaaaatcaggcacttaatctcccagaatagtggtgctctgataccattttctaagaaccaagatgactcttagctaatttctcagcataacaacaaatttagagaaattaagaagaattactaatgaatatttaaagagaaaactactaagatatgattgtattgatgaaaaacaccgattacaacctaaccaagaggttggagctctcccaagtaaccatttctctcactaaacttatcaattttcaagatgccgtttactactccccttagcaaactacccaacttattccccaataaactaaagagataatatctaaaatacccttccccctacaatattagttcttagcaccatcaaactgggatggatggttttgtaaggttccaatttacttctccatcaaaatattttaggattttttatctcatgtattttagagtttcctcgtccctttttatctgataagattcttctgatgatttgattttatggtaggctccaatcagcaatattaaagaactgaagattctgaaagctggagttccattttcacttgacttcattccagaggtttgtatttttatagtggttagacatgcttcccctagttttcaaagtaaaagcatccttgttgtgacgatattttttcccttgtttttgtttttattattatcatcacttatttccattttctattttccatgctgataagatgttcatcaccataatcttgtggtatcagaagtgtttagtggagtttattcactacacatgcagttgttcttttgccatgaccgccattcattttctcgtcaaaacaaatctatgaagtttggttttcagactcatggttcttgtagctcttgtgaatttttttttcttctccttgcatgcattcttcaaattacatattgcatataccaggtgctctcctttattttatatttaatttttaaaattctatcatatattttttaatgtcaaacctcaaactaggggttcactgcatcttaggcttaccaggctaatatttctttacttaaccttttccctttatatttgctatcctcttgtgtagtaatcaccataagaagggtacaaactaaattaccctcccattcttttgtatcattctgaaatagtgtcacagagctttgatttttttgccctcatttaatctggcaaatgttctctctatttttttttttttactttcttttgacgggattctcaggcaattgttacggggagcagccagtcacactgtttctgtttattatgcaggtgagttacctgcccctctctgttatgattactgcgtttaagaagaccagcgttacaagacctcttgagggcttcggagttcttatcccttcgaatgagcaacataatggactgaagactgagggtaactgcctcgttcacgtgtgtagcgaatcagattttcaaaccctgatttcgtaacattgcaggtactctgttttcatctatgatgtttccagatcgtgctttctccgatatgtatctctatactaccgttgtcggcggaagcagaaatagagaacttgcaaaagcttcaacgtatgagatatgcaatgttttaaatgtatgctatagtcatcgtttcaaccttttggtgcctttttcttactaatttatcctcctggtttaatgatcttagggatgaattggagcaaatagtttcgtctgatctccaccagctgttgggcactgagggaaaacctacttttgtgaagtattgatatctttcacccaacttaacatgatttgtgcttataatatgttaaataaagtaactgaaatcctgaaattaagactacgaaactgtatggtgacagtcatttttactggaacaatgcattccctttatatgggcacaattacgactcagttctgagagcaatagaaaagatggaaagagatcttcctggacttttttacgcaggtaatctgtcatttgcttgttgcgataaagttcatgtacagttggcatatcaatcaacttgcattctttcttgctaactccaaacaatcaggatcattaacttgtaggctgcagcaacagagagtatctcccaagttgttaggtttcatgtaacctcgtcgctgagatgaaatttccgttggctaaaaagtgaaagttttgtattgatgttacccaaaacaaaagtattttgcatgttgcttgaagttttggttgtttcagatagtacatcctttgacatgaaaataaatggaaaagcgtatgtcaagcaattatcatctagtttctttgtttctagatactagccgcatttgatcccagatcatttttgaggaagtcagctgaaataccgtagctatccttcagttttcataataaaactttaatggatctgatgtacagtaatttagtgtgcaccgggttaataattgatattaacttcatatagtgagtcttataaagatataatgaacttatatacaatatagtggattttattaatggaaaacatatagtgaaactatatgcaatatagtatgatacataaagacttagacaacaagagcattcgaaattacaaagaacaaaggaaagaacaattgtatcaaaccggttcgaatgaacaaacaaccaccacttccacaatcaatgtaccaccaatcaagactaaactataacaatgagcttctagtttaagtctactttgagttttaatcaccaattcaacgattagatgatcaaaattgcaaaggttaagagttggtcaaacctaaccaagagttacactaggcacatagctttgttaggagtatattagtttatgaattctagttaagttagaaatccaatacctagttggattaggattcctaattggattagaattatagtttagttagaattctagtaatagtaggcgtgtgattaggagatataattagcttaattcttatattgttagtttaattcttatcctcgttttaggtttatctttagtcgaacttgtaccctatataaggggcctttatttcattaataatatagtttattttgagtttaaacctttacttgtgattgtttgcttgagaggttattaatcgaaccattaataacttttcaggattgttaagtttttagtgttaaacatcttaatttcaggagtgattttaagagtgtttagattcttgtattcaagtttcaggactgatcttgaatcaagaaatatccctagtttcgactaatatcataagtagttcgaattcttggagtcttttcttcaagattcatattcataacttgattatttagacttcttggttttgtaatcatatcaagtggtatcagttttccagggaggagaggatacaaagggttctctttgatcaaagaagatccaagggcatcaataagaatgacacttgcaataagttcgagtgatacaaacaacttcaagactcgatcttttgctaccaagaaccaatcttgacgcctgaagattgttaggacaaaggataagaagtgtttctacatccaagattgcattctttacgtccaagattgcgtcaagatccattctttaagttcaagaaaggagtagaaagcattcgaacactacttaaacatgacatccgagatggataagctggctatggccatgagtgccttggcacaatcacaaactgagtcacgcaaccacatgggtaggatggaggcacgtgaccgtggattgaaactagatgactatagtggagatggcaatccagaagacttgttggagtggatttgccaactaggcaaagtgagtgattataggggctttgatcacaagaagagattcaaggttgcttccattaggctcacgaagtatgctggaatacggctcgaaggattgcatgcacaaacttcttgcctaatgactatgaacaaaaacagttcataaggctcgcatcaataagccaaaacacacttagtgtacacgaatacagcatggagtttgacaaattagggcttatatgtgacatagaagagaaagagcaatacaagattgcaatgtacattaaagggttgaatcgatatatagccaagaagatcgaagtctcaacttatcacttctttgaggatgtgactaaattggctaagaaattcgaagagcatgacaaagaagaagggcctaagagttcttacacacctaagtatgactctagtgctaaagggaaatcaacagttccctactcaaggtggtcggaaagacctaagaaccccactacacctaaggaggacactagcatggagaagacaaaagtggccgtacctaaggagagtttaattttgtgttttatacatctttgcttaagagcttaacaattgaaactattaataacttttcaggatggttaagtttttagtgttaaacatcttaatttcaggagtgattttaagagtatttagattcttgtattcaagtttcaggagtgatcttgaatcaagaaatatccccttgttcaactattataattgatcttattcgagttcttggagttaatttcttcaagattcatattcatacttgattattagacttcttggtttagtaatcatatcaatatcattagcattaatttacccccagggagattaagaaaggattagcctaatcaaggcgcttaagaagtttttaggaaaaatcgtgcttgttaagcttaagaattgaacttctttcaccatttgcccttgattctcttgttgaactagaagatcttggttcatagtagatgctcctgcatcatagtagagcatttaattttaattttttaacatgcacgaagatgtaggtagtgtagtatatatcgtgagacgtggtttaacatatagaaagatgtagtttctgcatgatatagtgagtttttgcatgatatagtgaatgtctgaatgatacagtggatcgttccgaattgttgtagtttgtatgatatagtatttttgtgaatgatatagtgagtttcttcatgatacaatgggtttctgaatgatatagtggattgcttagaaatgatatagtgagcttttgtatcatgtagtaggtttctatgtgatataggttgttaaaagatgatacatgcttttggcctcatgtactctaatgttaacgtgaacccggtccttgcaagtcaattgcagttttttcaatattaagctatttttttttttttttttttttttttttttttttttttgtacgggaatatttagcatctttaccacaaacataaccatacgaatattatgcggaaattccagtctgaagtcttaacttttcaaaattaaaagcttctatattatttttggaatgaaaaaaaatgagctatggcatgttattttgaaatacaatgagtctcaaggtgcatagtggcttcaattctacgaataatgaatggactactgatttctaattttttgttccgggcttttgcattaggtaaccataaagatggactctctgtgggaagaactatttcctctggatacaaagctgcggagcttgtgatatcctatctcaactctacttaagatgcctaaatgatcgaggagactccgtaagtcctttctctgattctatctttgaactgagtggaaacacgactgtggtctaaagtagttgatgtctcagatatccagaaatggcgttagtgatattcaggagctgtccattgaccctttgattcattgttgcagtttactgaaagttgttagctggtctcagaaaaacgaaaggaaaaaagggggaaaacaaaaacaaagaaacgtagattgtggtgttaaaatcaagaattccagagatttgtaccttctttatcagttgaattgtttacagtgtgaatcaagaagttagctcgaccttcttttcttgtgaatggtaagatttcgtgatcatcaatacttgattgtgctgtttgcaacttcaacggtaagatttcctgatcttacagtttaattgcttgtgctgtttgccactt

SEQ ID NO: 101 - DNA, 1575 bp, synthetic construct
  source 1..1575: mol_type = other DNA
atggtaatgctatacgattctcacctctcaggagtctcaactcatcttcaactatcgcaggcatttcccaggaagaacccattaatggccaaagtgtctgagccgggtaaacccacttctgctaaaaggattgctgttgttggtgctggtgttagtggacttgctgccgcatataagctaaagtcccatggcttgagtgtgacattgtttgaagctgatactagagctggaggaaaactcaaaactgttgcaaaggatggtttgatttgggatgagggggcaaatactatgatagagagtgaagcggaggtcacgagtttactcgatgatcttgggcttcgtgagaagcagcagtttccaattgcacaaaacaaaagatacattgcgagagacggtcgtcctgtgctgataccttcgagtcccattgcacttctcaagagcaatatcctttcagcgcaatctaagctacaacttatgttggagccattcctttggagaaaacgctatgcttctaagatttctgatgagcatgctcaggaaagtgtgggtgagttttttgagcgacattttgggaaagagtttgttgattatctaattgatccttttgtcgcgggtacaagtggaggagatcctcagtctctttctatgcgtcatgcatttccagaagtatggaatattgagaacaagtttggctcactaatttccggattaattcaatctaaactgtctccaaagaaggaaaagggtggaggaggaaagccttcttctaatgaaaagacacgcatacgtggttcgttttctttccagggtggaatgcagacacttgttgacacaatatgcaatcagtttggtaaagatgaactcaaactacagtgcaaggtcctttcattgtcctacagtcataaggggatcccttcttcagaaaattgggtcgtgtcttctgtgtcaaaaaattccattgaagatcaacaatatgatgctgtcatcgttaccgctccaatcagcaatattaaagaactgaagattctgaaagctggagttccattttcacttgacttcattccagaggtgagttacctgcccctctctgttatgattactgcgtttaagaagaccagcgttacaagacctcttgagggcttcggagttcttatcccttcgaatgagcaacataatggactgaagactgagggtactctgttttcatctatgatgtttccagatcgtgctttctccgatatgtatctctatactaccgttgtcggcggaagcagaaatagagaacttgcaaaagcttcaacggatgaattggagcaaatagtttcgtctgatctccaccagctgttgggcactgagggaaaacctacttttgtgaatcatttttactggaacaatgcattccctttatatgggcacaattacgactcagttctgagagcaatagaaaagatggaaagagatcttcctggacttttttacgcaggtaaccataaagatggactctctgtgggaagaactatttcctctggatacaaagctgcggagcttgtgatatcctatctcaactctacttaa

SEQ ID NO: 102 - DNA, 37009 bp, synthetic construct
  source 1..37009: mol_type = other DNA
tattccatcgaatgtagcaaattgactgtccgttgcaatttcggagtttccactcgtcgcatggtaaatggtaatgctatacgattctcacctctcaggagtctcaactcatcttcaactatcgcaggcatttcccaggaagaacccattaatggccaaagtgtctgagccgggtaaacccagtaagtcaaacattcgaatcacaactcaagcaaatttgtcttgtttgcgttatattttgctcatttcagccttttttgtttttccgacctttgcatactgaatattgtgtgtgtgtgtgtgtggggtttcagcttctgctaaaaggattgctgttgttggtgctggtgttaggtaaattttcgtctcttgcagagtttttgagtcatttgggaattctatgtgaaacttgtaactcccttcagtccaacgaacgcagtacaattttctatcaaatcatggtcctaatttccaattttccatatatattgttggaattatattgggattgtctatcactattaatagtattaggatcaattgtagagaagcacagaaatttttgggatcgaaagaatatctggattgccacattaacagcagatataattcttccaattggtttttggttcttcctaccttgacttgtctggtcaaacattataaactttaacctttaatatccattaaagtaaactataggatttttttgtctaaaacatgcttatataacatgaaatttgtgagaaaccaccttatatatatttttttgcgaaaacaaaccttaaacaaaattattatcgtgagaacaaaccttatgccaatttcgatcattgacccaaggttttggcattgaccgtgtcatgaattttgttgggtttaaaaagtcatgtgtcttgcatacgaaatggtaaatgcgggaaccttgggtcaatgtttggaatccgcataaggtttgttctcccaaaaaatgtttttgttcaaggtttgtttttgcaaaaaaacttatataaggtgctttctcagaaatttcatgttttataaagtagtatttgacaaaaaaccctaaaatatattatagaattattattgactaaattgtgtaaaaatgtactcttctaaaagtacattatagtattttagtggaacatttgcgagaaactactttataaatacgatttttgcgagaaatttcctaataaaaaaatgtgaagtgcaaaactatcttattgataattttctactccctcaaatccaaaatactatgaagtctttcctttctggtttgtcccagattagtttgtacgcttccatctttggtatgatcccacttttattatacttattagttttacgtgagttccttactctatctcttttaacaaaaatactcaactatctctatccaataaaaagttccttactagtcctatcacatctgctttttaataaaataacgtttgataaccacacaacttatatccttaaaatacacgttcaaccaagtgttgagattaatttggacggagggaataaatattttttgaggcatattggtagcagtattcggattccgataggttgactatgtttccaatgttgaccaacacttgccttgcatgtaattctaactttgctcttttttattcttcatttccctcgtattccatatacaatgtttagagacccattccttcctcttctcttctttcccttccttactatgctttgccataatcttcctcaaatgagtgcaaattaatttgtcgttgatgtaggccaactgattgtagcacatcttcatagttcatacctcaacacactcgtaattatattataccctacatgttaaatggctcatgaagctttattttatatcatacttcctccgtttcacaataagtgtaacacttttcttatttggaataatcacaataagtgaaaccaagctccaaatggtaagaaaagttcactcttattacaaatataccaccaaaaagtaagaggggatcacaacttcaatacttcttcactctactttattgtggtcccaactttctctctctaaattccttggtaactccccactttctctatgtttcacttatggtgaaatggaggaagtattttgtagtggtatttagctactaggccttggatgatatacaatcatacaatgtatttatattcacgataatttgctgcccaccttgattaccatgatttccaccaattttatcaatttcagtacttcaccaccccgaatttatattttttatttccaaccttggtatctccatttgtctgagtgcccgatccatttgtatcgcctccagaattgaagaagcttcctgcagctagacaattaggaaggttaaaaaagtttggagatggtggaggatagccataataatcattgttgggaggtggaacttggaaggttattgtagggttgaagtccttgatgaagaagaattgagttcaaatgagaggaaaaaggagcagggaagagggacaataagaaaaaaaagggtaaactaaaatcacgtgtaaggcatgtgcagatcaacatcagaaagcatagtcaacctactggtattagggcactgatacctttttgggtcaaaatttttttacaaggtatttcatgaggtagttttgtccatttttttttttacaaggtatcgtctcattttttttttatcatttagtttctcgcaataagtgtatttcatgaggtagttttttccaaaatttcctcatttattataaaatacctcatcttttccataaataatgcaatgtctagacttttacgctgtttacacatgctcctttgaccatctattgacacacaaggaaaaatagagtagagtcatgcaggatcttgttagatttttctcgatatatactttcaaaagatcaatttttttataattttttttttgaggggattttttttttataattatgtacttatcaaaggtcaaagttgtgcaccgggaagcataaaactctatgtgttgcaatttacatggaaggggaggagtataataagagaaaattatggtaaaaggttcattcctggagatcatgagaaaggaagtagaaagaacaaaaaagaacaatgggagtgcttttcaatgtttgttgtacgtagcatttattcatttgctataatgttttgtgacattgtagtggacttgctgccgcatataagctaaagtcccatggcttgagtgtgacattgtttgaagctgatactagagctggaggaaaactcaaaactgttgcaaaggatggtttgatttgggatgagggggcaaatactatggtaatgtttttgattattgcaggtcttgcactttagcgcacaattaatttctggatttttttttgtactgtggtggttatggtcatcaacatgtctcacccactgtgcttgcagatagagagtgaagcggaggtcacgagtttactcgatgatcttgggcttcgtgagaagcagcagtttgtaagtctttcattatctgaatggcacatactttatttcgaaagattgtaattgccttttctttctagatggcttcatcttcatgttgctttctgattcagtttcgtggctaactttccaagtttgtctgattgctaactctgtcatagccaatcgcgcagaacaaattatacattgcgagagacggtcgtcctgtgctggtaagtttgcttgttttacttttgacctcttttaagatctttcaactctggagcctggaaacatggtgatgcaggaggcaagttctctctattttacatcctttcttctctgtatcttatgacatttgcctcttattctgtgcagataccttcgagtcccattgcacttctcaagagcaatatcctttcagcgcaatctaaggtcgttttatgttaagacatacttgatgctgagagtttattgaattcttaaccttcttcttattttttttttatttttttagcaaaaggtaagtatattgcatttaccaaaaaacagtatgtacaccaccacagcagccatgtcagaatctagaaataccaccgaaaaaatcctacacccaaccagagacagttatattatatcctactcctaagtttctgtacccaatttacatcaatattggtccatttacaagatatttttataattcacagaagcacatcagttttaattagtttaataatgacctctggatgaataaccaactcagaccatatagccttattcctggctttccggaagttgtacgccagagcagcaagcacagcaatgcaaacctgtttcttatacctccttttatgtgtcttagcccatctcttatagctagtgaagatacagtcgtgtgcacaggattgaaccccaatccaactagcgaaagcctcacaacattatgactataaatacatctgaagtataaatgctgcacctttttctcctcttgcctgcacggtatcagaacaaatcccagctttagctaacaattccctggttttcagtttattcaatgccatcatgcaagcaatgaaagaatgttttggaacattcagtttgttccaaacacagtgagagcaagggacctttcctgcagttccacttagccacttatatccctgactaatagtatgactctttgcaccgtaaattgatttcaacttaactttttcataagcagtgaattgtgtgttgttagagtgtctagctgtctaggagattgggagaaaaggagggaccaaggagatagaaacacacctttgtgtttctttgtgtatttactttttagggtgggtcacgttttctgagaaatttgggaaaaggaagaaatagtaacacactttcccatttgtataacctgtatactggagctccaatataatttgcatttttttttgagctgcaagaatatgttgacaaacagttattgcttcttcctcagctacaacttatgttggagccattcctttggagaaaacgctatgcttctaagatttctgatgagcatgctcaggaaaggtaatgtcaagacatgtgttacctcgccttaattttcgttccaggaggtgagcatgcatttagaactaaaaggcacaaagactgttggtggtcttgcctgttcaaatataatggagaggagttttcgctacatttaccctctcttgaagtggggttgaaatatagcatcaagttgaatgcttgattaagtttaaaggacttgtgtaactctttttctgtttactgtgattacatgacctggttgattaacataatggtctgtttatctgtagtgtgggtgagttttttgagcgacattttgggaaagaggtaatggtttaccatagtatttctgctttagtggtaaattgtaatgttgctgataattatacttcgctgcagtttgttgattatctaattgatccttttgtcgcgggtacaagtggaggagatcctcagtctctttctgtaagtgaacattttgtgcttcactcccaattttttggaggctggaaatagattcttttccagttgttctgtcaaaaatagatgtagctttattttgaatttgaagttcccaattgttcattttgactattactgattattgctaagagtggcattatgctattatgctcctaaaagaaaggtgaattttgacctacatatagtataatgtatcaatattggtttaattgtttgttcttttgttccttttggtgctcatcttgcgccttgttctcatcgctcgttttttcatgttgcacttgatttaaatttgctcagcttaacttgtctttttgaatttatattacttattgctatattttactaatttcgttgaaactaattttttgctgaacttttcgttttgttgaaatcatttttctgaattaacttgattttcctgaatagaattgaattttggtgatcttaccttttctgcagccttttatttctttcttgtcctttttccaatctcatttttttatatttccattgtgttgacatcttatcattaactgtgcagatgcgtcatgcatttccagaagtatggaatattgagaacaagtatggaccataagacgtttattttaatcgacatgtatgtttcttagtttatacatatattaattctgtggtaaaaaaaccgaacaagaatatctttttttttttctatcatcaaaaagggtgaatatatgtagaggaaaaagatttgaatcaagatattagcctaaagcaataataatgttagtaatagctttaataacaaattcaaaacgtacattaatgaaccgagaggccggaaaatagttaaagtgaccactaagagaagcgaaggattcatgatgggttttcaacccagtagggcaaatttgttcaatgttctttacaaatcaagcttattaccttgtgggtgtttttgctagagatgaatgatagaattttccctagttggaagtcttttttggttactttatgggagctagtgatgtaatttgtttcgccttatggcatttcctaacatgtgcttttgtgatgtattgaagctttttttttgccttaatttatgctggattttaattttgttctttgtttcatttttcttgcttttgaaaaaaatatatagatatgtatatattaggattggtcgaggattttgagggaagggaaagacctaagaaaacttggatgagggtgattgatagtgatatgagtctatttgggatcgaagaaaatattcctttggataaggtgtagtggagggttgagggagcaaatttatgcagattagcttgacttaaagtttttctttttgattatttttcatttacttgtgttttgcaaacatttactcatgaatgatgtaaacttcttcaaccaaatctctggaaaaaaataatctacatggaaaaaacattattaatgttaacttgacagagatcccatccttgtgaagcagctagcaattaggcatctaacaattgacattttaatggacaggatagaatgtctcttgatagtcaataccctctgtttcattgtatcccatagctactaatctagtttgtatctttccaaagaaccattattttgaagtttcaccttgaacacccattttgaaccaatatgtttcttgcccttggggagaggggctaattgccatgttttgatgcggatgcaaagacacttgttctacctgagcctattgacttgatcatggatactctagggtttgaactcaagggaaagaatcaagtcttggcatgtgtggtgacatggcgtggggatggagtaaagaagagtcatagttctgttaggatatgttcttgcttgctacatagaatcgtagttctgttaggattgctatgatattatatctagtagatagattttatagttaattaggataaacatgtgatgatcatgttataataggcatgtgattagaggataggattagcttaattcttatcttgttgttagtttaattcttatcctagttttatgtttatcttagtcgaagttgtagccatataaagggcgttccattcattaataatacttagttttgctttgtgttttaaacatacttcttgattattgtttgcttgtgagctaactaatcaaaccattaaagacttttcaggagttttagtgctaaacatcttaatttcaggagtgattttaagagcgtttagtgatcttgaatcaagaaatatccttgttcttgttcgactaatatcagtggttttgttcgagttcttggagttaatctcttcaagattcttattcaacttgattgttgagcttattggtttagtaatcatatcaagtggtatcagttttccagggaggagaggatagataggattctctttgatcaacaaagatccaagggctatcaacaaggttcaaacattgctgcttgttcaagacttgatctttttctaccaagatgcattctttacgtcacaaggtagtaataacaagattaagagtggtttttacatccaagaatcaatctttcacgtccaagatttcatctttcacgtctaagattcattctttaagatcaagaaagttataacaagcatagaagaacacataaccatggagtccgagatggacaagcttgccaaagctatgcaagcacttgcaaagtcgcaaactgaatcacagagtcgactcaatgagaatactaccacaatcaatgggattggtagtaacatgaataggttggaggcacgcatggatgccattgcaaccatcatacaaaagaagcttgatcggaatagtgccaacttcataggtgccaattcagaggaagagttggcagaacgtgaagaaagatcatccaagactacatacaatgatgatcgtggcttaaagttggatgactataatggagatagcaatcgagaagacttgttacagtggattcgacaacttgagaaggtatgtgattatagaggctttgatgacaagaaaagattcaggattgcctccataagactcacgaaatatgctggaatttggcttgaaagcttcaaggcacaacgagccaagaaaggtaaagaaaagttgtgtagttggacaaagttgaaagttcaagcttaaagagaagttcttgcctagtgactatgaacaaaaatagttcataagactctctactataagccaagacacgcttagtgtacatgagtacaccatggaatttgacaagctagggcttatatttgacatagaggagaaagaacaatggaagattgcaagatacatcaaaggcttgaaccgccacattgccaagaaggtggaagtatccacttatcacacctttgaggatgtgacaaagttggctaagaagtttgaagaacatgagaaggaagagaagcctaagagttcttacacgcctaagtatgatactaatgctaaggccaaggctagcttcctactcaaagtggtatgaaggacctaagaggctaagaacctcaccccacctaaagaagacacaagagttgagaagcctaaagtcgtcgttccaaaggagaaatttgaagagatgagaaagtgcttcaagtgtcaaggaaggagacacatagcaagcaattgtcctaacaaaagagtcctcaccatgagacaatacctagctttgcaagaagaggaggatgtctattagttcgtccctgatgaagagcaaacttaggggaagaagaggaggaggatgcttttgctgaggatgatgcaaggctagtaggggtcaagaggcgcaccttacatgtcgaccatacacctagcatggagcaaatggaaaaatcttttccacactagatgcaaggtaggtgactatatatgtaatggtataatagatagtggttcttgcactaatgttattgtatctgaggtagtgtcaaagctaaacttagctacaagggcacaccctaagccatacaagttgagtttgctagatgatagcactggcatgagagtaaagaaacaagctttgatttcattctctataggggttataaggatgagttatggggtgatgtattgcctatgagtgcatgtcatctcttgcttggaagaccattgcagtttgataaaaaggtcatccatgagggggactctaatgtgtactctgtgttggttggttctaagagggtatgtttgcatcccttagctcctcattcagtggcgccaaagcaaccacctaagacaccaagttactttctatcttcaagggagttcgaacaagaggtggaggaagaaggttgtgcttatgccttgattgtaagacatgctgccacaagtgtcaagactactagcaatgagaagctcgaagccttgatgaaagagtttgaggatgtctttctagaggaactacgacccttgagaggcatagaacatgctgtagaccttgtacctggcgcccctttgcctaacaagcctgcttataagtgtgatccagtggcatctagggaattgcaacgccaaattgaggacctaattgaaaagggctatttaagggagatcatgagtccatgtgttgtgccagctttactagttcctaagaaagatgacacatggaggatgtgcatagatagtagagcagtgaacaacattacagtcaagtaaaggtttcctatgcctagattggaagatatgttggataagttacatggggcatcaatcttttctaagattgatcttcgaagtggctaccaccaaatgaggatcagagaaggtgatgagtggaaaacaacattcaagaccaagcagggattgtatgagtggatggtgatgccatttgccttatgcaatgcgccaagctctttcatgagcttgatgaatgaggtacttcgtccgttccttaacaagtttgtggttgtttacatagatgatatacatatctatagccaaaatgtggaggaacacttgttgaacttgcgtagcttattcatgaagcttagagagcaccaactctatggtaagattgatggcgacgaggttgacgggggattatggcggcagtgaatcaccctctttgccggtcactgaaatacaacctgaggtatctttaaattctgtaattggattgactaacccaaaaactatgaaattgctgggaaaaattgctggatgtgaagttgtggtgatgattgaccctggggcaacccataattttttatcactagctactgttgagaaattagctattcctgtgtcggaatcggaaggatttggggtttctctaggggatggacaggcggtgaggggtagtggaatttgtagaggggtgttattgagtttaaatggtggagttgaagtggaaacagattttcagcctctgggtcttggtaattcggacgtgattttgggtgtacagtggctggagacgttggggacagtggagagcaattggaaaacacaaacaatggggtttgaaatcgagggtgtcaagttcactttgaaggtgacccatcactggcgaggtctcgaatctcactcaaagccatgatacgtaccttatgtaaagagggtggaggtttgtggcttgagttgaaccagattgagcattatcaggagaaaacaccgcattcatcagccttacctgaaattccagttttcttacagagagtccttacccaatttcagtctgtgtttgctacaccagaaggcttaccaccgataagagaacatgaacatgcaatagttcttagagaagggtgtaatccggtaggggtaataccgtaccgttatccacagttccaaaaagatgagatagagcgcctcatcaaagaaatgttggcttccggaatcatcaatccttccacgagccctttctcgagcccggtgatattagtgaagaagaaagatgggtcgtggcggttttgtgtagactatcgggccctcaataaagaaacggtccccgataagtatcccattcccgtgattgatgaattgttggatgagcttcatggggcaacacttttttcaaaactcgacttaagggccgggtatcaccagatccgggttaaggccgaagacactctcaaaacagcttttcgcactcatgaggggcattacgagtttttagtaatgccatttgggttgacaaacgcgccggcaacgtttcaatcccttatgaacgaggtcttcaaaccattcttgcgcaagtttgtcttggtatttttcgacgatatattggtctacagtagttctgccaggaacatgaggagcatttgaccttggtgttgcacaccctagcagctcataaattgtttgtgaatcagaagaaatgtgattttggcaggtcggaagtagcatatatggggcatatcatctctggtcaaggggtggctgtggatatggagaaggttcaagcgatggtggaatggccccttcctaaaaacctccgggaattacggggatttttgggccttacagggtactaccgcaaattcgtacttcactatgctcatatagccaagcctttaactgatcaactcaagagagatgcgtttgggtggtctgaggcagcaactcaagcctttgaaaagctcaagaaggcgatgatcacatcccctgttttggcaatgccggacttccaagagttgtttgtggttgagaccgacgcatccgggtatggtctgggggcagtgttaatgcaaaacaaccgacccattgccttttacagtaagttgttaggtgcccgggctcaattaaagtcgatctacgaaatggagttgatggccatctgcatggcagttcagaattggagatattatctgctgggtcgacatttcctcattcgtacagaccaacagagtttacgtcatctcactcagcagcgagaagtaagtactgccttccaacgttggatgagtaaacttatggggttcgattttgaaatacagtttaagccggggtgtgccaaccgggtagctgatgcattatcccgcaagacagtgggagaggttgaattgggtgcgctgatattaactcatggggtggactggaccgacttggagcgtgaaattgaaggcgatcctctgttgtgcaaaattaaacaagacttccacgggggtgctattactcctgtgcacttttctttggtggacaacaagctgttgttcaagggtcgatacgtgattcccagctcttcggtttttattcctaccttgctgcgagaatatcacgattctcccattggagggcattcgggggacctcaaaacatatctcaggatggctgccgactggtattggaggggcatgcgcaaggatgtggcgcggtatgtgcaacattgtagcgtgtgtcaacaacaaaaaatgtctcaacagatgccagggggggtactacaaccactccccataccttcctcggtttgggatgacttgtcaatggacttcgtggaaggcttgccatcttccaagggggtaaacaccatcctcgtggtggtcgatcgtttgtctaagtacgcccacttcctcccactacgtcatccatttactgctgtgtcggtggcaaatgtgtttgtcaaagaggtggttcgtttgcatgggtttccttcctccattgtttcagatcgggatcgaatttttatgagtgtgttttggcgggaattatttcgtttacatgacaccacactcaaacgaagtaccgcgtatcatcctcaaacggatggtcagtccgaaatcgtcaatcgagctctggagacttatttgcgttgctttgtgggggaatacccgcgctcttgggctcagtggcttgggccgaattttcatataatacttctcctcatctctctaccaaaatgaccccgtcaaggtcctttatggtagagaccctcctactgtgatacgggttaatcggggagcctcacctgttgaaagcttggaaaacatgctccaagagcgagacgcagtattagatgccttgcagattaatctgattaaagctcaacagaaaatgaagagtagtgctgatgctacaagaagagaggtgcattttaaggtgggagatcgagtgtacttaaaattacagccttaccgtcagaaatctttggcttaacgcccttatgagaagttagccgcccgtttctacggaccatttactattttacagaagattgggcaagctgcatacaagttacaacttcctgtttctagcaaggtgcatccggtgtttcatgtctcccaactgaaacaggccgttggttccattcccgtttcagccactattccagagcaattgtcttctgacttggagttagaggtggaacctgatgaactcctcgatgttcgtagtgtttctagaggccagcacacttacttggaagctctcattcagtggcagggattaccatcattcgaagctacctgggaagatgtggctgctttccatcaccattttccatccttccaccttgaggacaaggtgaaactttgggggggtggtaatgtgatgcaccaaactaccactccactactcacctattagaggcgtaagaaaaagggggtaaatcaggaatagtttacaaattctgttgaaaggaatattttgtaattatgatgtcagaggttgttagcaaaaaggcagtagagtaacaataaaaaggggaagggaggagagaagaaggtattgagatttttgtaaggaacttggcccttgggagagttgggagcctctcgaaagctcaccattatcttgtgaatattttccttcctggttatatacaagaaccttcctctgtcaatttcttttctctctaatcttatttcttattctgttttctggttgccattgtttgaagttgcttgttgtgcttgagtaaatacgtgaagtggtgaaacccatctgaattcatcacatctattccaagtggtataatacaagcttgtaatccaaatctaatgagaaatctaagttatgaagaatttcaaaagaactaagtacccttgttttggatgcccaaggatttacttgccgctcaagttaatgctcaacgtgcaagatacaacctctttagtatcccaaggtagtttccataagaattaattgagctcaaatcaagaacaatatttttatgtattaatgtgaacacttcctgaattatattagatatatggtctgaaggttggaagaaagattagcttttaattttaagtttgagatagtttttagaatcgaggaaagattagctcttaacttgtaaactaaggattgctttataagtaaaacattagttatggaactcttaaaattggttttgaacatttctagttaaaaatcccatgtaattctcccaaactagcttaaaatctcacatttcacaagctaaggagagacaaatggcgttctcttgtgaaacaatctaaaattttcattaggctactgttttcaagtatttatatgttagaagtgccgcatataggtacataaaataagtttacaaacacaagtaggaataaggaaaactaaaagagaaacttcagccatacaaaaccggctgaaatcagctactactttctactttctagcttcaaaatctgattgcaagtctcctttaagccaatcaccaatgaaaacctttcctccacatgaagtgtgctcaaatcaagagaagaaacccatcattcgcctatagctacctgggtcagatgaagatacggcaaaaaaaacgctggaaatcagtgaaccaaaataagcaccaattggatgctttctgtccttgctacattttcttctcataggactacttcaagccatacatgaataagcagttagatccagctcctagcatccatttgatcgtacaaatgagctccaaaaagataagtaaaaccaagcagccaaaacctaattaatactaatgatgaattagttgaatagctaatgacgatgaagcaacactttagtaggaatagtgttaattatgatcaatgctacttaatcttctgattaatttttggaaaaatgtcatatctaccttctgtatacacttattcataactatatcgtattattattatttttaaataactaccttttaagtaccaaaacctaagaaatcaggcacttgatggattccatccaaagatccatttggcggggcccactaactgacttttgattttttgcctttcctcttttggttaatctcaatggttcatcaataacaactcaatcttctccccatttcatcaaatcatccctaaatcagaactttttcaaattcacccaaatgaggttatggaaacctctaccaagtttattcgaccacttttagtctagctcaaagttttacacttgcttcaaaaactaagatttattaactttagaaattaggtttttatttttattttttatttaactttgtaacaatcttaaataactcaggtgctttctagagtttggctttaattgtttttcccttggttatgtgaaagaagtatgactactttctccaagactaaagtagagagcaaaaaatgcaattctggaatttcttgcaaaagaaaaggaacgagttaatgataatgaaaaacaaagaaaatgatgagaagagaggagctgaatcaatcatgatcatgtattttaaagttttttttgctattgaagtgacttaagaagaggaaagaggatgagtgaagacaaacaaaagaaaggataaatagagggaaatcttgggcttagaaaggtgaaaaggtaagaagatgagttagtgggccccaacaaatgtatctttggatataatccgtcatgccactgtttggggcttgcttaagtccatacattacttcactaattttacaaaatttattttcttgaccaagaactgaaaaaaccttcagtggtgatctattaggttttggaagttaaaaggtagttatttaaatgtttttaatataaaaggtagttatttagatatttttaatataaaaggtagttatgtgaataaaagtgtatataaaatgtaattttttgacatttttgccttagtttttcttgctaattcaccttttcaacttgaccaagttgctatgaggagaaaacgagcaattattaagcaaatcgcaacactagcattaatccatggcccatgaaactctccataattagagattggattagcacttagtagaacttcttgctcctgctccaggtttccattacttctttatctaagtgcatcaaaaggttgttgggttatgaaaggtggtggttgtgtatagtcattgtcaaaatgttgttaatgcactctatttagaggatgagggattgaatagttttcacctcgtgacctttcattcctttttaaaaaaattgataatgtgtattggtcctatgactgtatgaatggtaataagctatctcatgagctgttactatcttcctcagagtctaggtagaagggtttgggctgataattttctactatgtgcaattagtttgttggatttggatatgctagttgatataggtcctttcccttgggccttctcttaatataggcctacagtgtgattgaagataaatcttctggagaatataagaacaatgagatggattggttagaggttgatttgttcttttggtgtaagactatttcgggttctctattggttatgttcagacgccagaatatgtgttggtgattgttttccatgaacatactttatccgcagagacatttttcttttttcttcctataagattatatttgtttcctctcttggtgctcatctcagtgtctctactttacgttaaactgttgacattacttgacaatgcgtatatttgtcgcatggtgctcttccctcactccacgtcgaccccatacatcaaaaaatgccattaaagaatattcgaactcacaaccttgtgttgaaagaatggaatccctaccaatgactcattaattcattttctctttaagaaataaatgatttcctcacaaacttttaggctttaagagcccaaaagataaaaacataaaataagatagacatcaacgtcaagattagccttaaatgcacaaagcacatgtcaaatgattgataactactcacgagttgcaactctttgggcgttgcctaatattaattggatctcttttaaaaattgttggtggttatggttggtggagaggaccatgtaacttttagctggtcacaactggtaatgattgtcacttttactgcccataaaaaaatttaaactgttgaatatgtttctggcagtggatctgacaaatcctttacaagttggcgtccattttgttttgccatgtgactcaattataatacgtgagttttattatccaccaggtttggctcactaatttccggattaattcaatctaaactgtctccaaagaaggaaaagggtggaggaggaaagccttcttctaatgaaaagacacgcatacgtggttcgttttctttccagggtggaatgcaggtattagcatgtagctttcattctgttaacatttgtggttcttccagacatacatccaatgctttttttttttcttgctataaccataaacattcttgtcatgaacattctttaatactgttgctgagcttagtgtattcgttcattcatgtaatttcctctcttgaggttaaaatggcatacagccttacaacctatatccataatgctccttagagtagaatccctaggttataacatagtaccacttatcaaaataaacatggcacacactgcaggacaagaagtaaatccacctagagaactgagcacctagtagtaaaagcagcgatacattactaataacagtagcagggccataagagtagtaaatgggcctcatttcaacactccccccgtaatggtgagagagaagaagcagtctgaactcccagcttggagagcaaaatagagtgttgctgaacagggagaaccttagtgaaaacatctggcacttgatcttgagatggaacataggtaggctgaataaccccttcttcatttgtattgtccctcaggaaatgacaatctatgtctacatgcttggttttctcatgatgaactagatatgctgctatggcaagagcagcttggttatcacagtagataggagtagcactggactttttaatgcgaagatctttgaggagttgtttgatccacatcacctcacacacagcaagagccatggatctgtactctgcactgaccacaagaaattgcctctttgactttcaagatacggggggagtcaccaaggagcacacaaaaccagatgtagaatttacaacacccatcccattcactatcacaaaatgctgttagttgagcactagacttgttcgccatgagaattcaccctgttggcagcttgaagatgcacattagtggggcagtgcataaatttgcttaaatcatgtatagtgaaggcaatatcaggcattgccttgtaatagtgagataaatgagcttccccatcaatttttgatacacatcaggttgttgaagaggatcaccattgtcagcatagagcttgacatgtgagtccatacgaagcctcaatcgtctgcaatttataaaaccatattcatcaacaagacccatcacatacttctttagagataaaaacgatacttcactacactgatccacttcaatcctcaaaaaatatcttaggccacccatatctttcatgtgaaattggccagcgaagaaactctttgcttcctcaatagttgctaaactattgccagcaagaatgaggtcgtccacatacaccaatatagcactgaaacagtgagagttttgcttgaagaatagagagtagtcacacttggattaagtgaatacattttgctttaaagcagtgttagcttggcaaaccattgcctcaaagcctacttcaagccataaagtgacttaagcagcttgcacaccttagttcatttggtgtcacttctgccatcagtacttagctccccctctccttgaactttgatcctgttacatgtttcactatatcctggtgatagcttcatgtatacactatcctacaattcaccatgcaaaaaagcatttttaacatccatttgtttgcaagaaccaaccctctaaggatgcaacaacaagcatgtggtcatctttgctacaggggtaaaagtctgctcataatctattccatatctctgtctgtcacccatgattacaagccttggcttatgcctattatttgtgccatcagtgctgtattttgttctgatccatccatgtgagggatggctcatttctacaaaatcctagttccgttaggatttgtgttgttttcctaattctagtaggaataggactcctaaaatcctaatcctcctagttctgttaggagtttaaaagttttagtttgattgtaattctagttgtgttagaaatccaaatcctagattcatgtcacgtatggttagaacatggctagtaggataatttgtcttgtgatgtccatagccttggcatttgtggcacctaactttcaatagcttgtcttctgtctccttttctttctccttctttgaggaatcaacgtttttagagctatctaaaccactagcatcaatattaggtttaaaagtgctaaaagatttcgaatagttcttacttgcatacaatttctttttctagtttatgtagcgtcaccagggaacaaaaactcggccgttccgttctggaacggccgctttgtaacggatttcagagaggccgttccgttaaataccgttctagaacggtgatttggaattcacaccaaactcggcgcgatagcgttacgtaacggtgtaacggcgttccagaaccgttacaatcacataacgtccgttatttgaagaagaccagttcttttggtggaggaagaagaagagccaacgcaagatctatagatctgagttaaaatttgaaaataaaacatgtttttttatttaaattaaagcttacagaggatgtagaactcaaattcgagtaaacccctcctttaatttcattaggttactgcaaatcgaaccctaaattgcaaaccctaatttcgaaaaaaccctaatatgcattgggatgcaacgctgcttctccggtcatggcagagaaggtcgacgagtcatcttcggctgcttttagcactgtagctgccggtggttggcttgtttgcaggttagtgcttgctggttttctttctctcataccgatcatcttcttcttttctctcttctctttttcttttttattgtgtgactgccagtcacgtgataattgcaactcataaagtatctctttctctctcttcttttcatccctttttatttttctttcccttttagtttttattccctcacgtggaatcacctaattttcatccttttttatttttttagttacactcttacacagaagtatgttcaaatatcattatagtacctcaaatattgtatttataagagttttggacataatatgatatagaaagtaaaatagaagaaaaataaagtttaaatgtcacttgtgtgatttttttaaaaaaattcacgccgcgacggccgcgaaacgttctatttcccgttacaagccgttcccgcgataacgcgaccgttcccgcgaacgcgaccgcgaccgcgttttttttccttgagcgtcacatcttgcaagcttcttcaaaggtgagttatgtgtacaactccaatttctctccaatcccctccgtcctcatttaggcctccaaggaagctacttaaacattgatcttcaagttcatcaattttccaaagaatggataacttctcgaactcctttatgtaatcttcaacggacatattcccttgtttaagagtagaccattccatgtacaagctttgtttgtagttagaaggaacaaaacgtcctcttaacaactttttaagcttatcccaagtagagattttgggtttattagctttcacacgctgcctctttactccatccaaccaaatagatgcatatttggttaccttaagcacggccaccttgtatttcttttcttttggtgtctcttaatcccaagtagagcttttgcgtgtgaaagctaataaacacaaaatctctacttgggataatcttcttcttgtttccgaaacaactaattcttatggtagttaggaaagcaagaatggtttctaattcaatagggaatatattaattattattagtttaagttaaatagtgcacgaatctaaatagattattcgtctcaaaatctcacttaagtatagatttgtttggacatctgagggaagaagaagagagcgagataaaggagaattatcactcaatgaatccatatcccgagttttcccatttacttctttgaaagcaatatagttcacgaggtcttattatcagtctatggacataagagtaataatttaagggcaaaaactatgactttatgggtttaaactgatacatgttctgttaaactgatagatgttctgtgttaaaccgatactcatatattcctggttaaactgatagatatatgatttaaattgatacccgtctcagtcatgtcttggattgagacggtctgacacaagactttttgtgtattatatatctgattagaataaatttatcctgtttactaattattttatcttctccagacacttgttgacacaatatgcaatcagtttggtaaagatgaactcaaactacagtgcaaggtcctttcattgtcctacagtcataaggggatcccttcttcagaaaattgggtcgtgtcttctgtgtcaaaaaattccattgaagatcaacaatatgatgctgtcatcgttaccgtgagttttactttgcttactgctattgcaccaatctttcttcttttgacacactgataatggcaatgctgttgtggtttgaagccatgttatggggttttagggatatttatggagtctgatctaatatgttattggataaaattcagatctgtaacgtgactcaatgagattgaaaaaaattgaatcaagataatggattggaaaattaggagctaacctagggtctataagcgatccacttggagtctcataccaagcaggtattcgacattttaggtttatattgctgctatggctcatatgggagcctacatagggtctggtgcttattcctttttcttttgtctagttttggggctgcacatttctgttgtgttttgatatggatagccatcacctgcaattgcatggaggctgaactaagttctataggggagcaaacagtatctgttggaaatttattttcatattgtgtttttaaatgctataatccaaaatttgttgttcccctaaaatgcctaaaatacccttatgtaactgctccatctgtcccttaatagacttcccatttctccaatgcatgtttgccaatacacattttgtattgttaatatcaaaaattacatattagtaaaaattataaaagtttgattttcctaatgtacgcaatgagacgaatcaaacaagacgccatatgactatgttttttcttatacttcctatgttttttaataagtgacatgttttccttttagggaaatgtcacaataagtgacacatagctcaaagtagtaaaaatacttctcatttattacatctttgccattatttaattgtttcacctacctactttatccaatactcaaatttgattggttgaacaattggtcccaactttctctagactccttggtattccctttcccccactttctctctgtgtcacttattaaaaaatggaggacgtatattggaaaaaaattggaaggttttcttcacttatgaatagtggtaaaattagagatgggaaggctattttgggatggatggagtaatatttaaatttttaaaataatgtcattgttttagtgatgaaataaaattcaaggctattttttctagtaattatgttatctgtacatcaccacacgtatcgcgtgcatataagactagtttgatgatattccaacactgttcgaaggaagtcaggcatggaaccatgtttgcttccatatgggaaatattttgcttactctccttcaaacatctacctcattatcccagaatgattgatcgaatctaatacaaatatacaattgatcatatgccaccagggaattacatcaaattaaatttttatagaaggggaatcagtcatagcctcatagggaacgaataagtgatactcgccagtttctttcctggttacttttcctcttctcactagccatcctttatgtatgggtatgctgcatcattcctgccactggttgggactcccgtttgaactatggggggatgggaaagctaagccatcatcttcaaattgagtttcttgagaatgtaagacaccatctgtaagatgaatatagtgcactctatagtcaatgtcatgatctttatgggtttatctgctgaaataactgtgatatacccagctctccatttacaaagttttcctacatattaaactcttgcccgcaattctagaacttcattgtagaacttttcctacataagcatcatttgtcttttctgtagtaaaagttagaaagagctttattttagaacattcgtttttagttttctttgttgttgattactccgccacttttaatacttttatgattcaagtatttgacaaaatcatgtaatttaggtcctctgctgcatgcagtctataccctctctctctctctctctctctctctctctgtggttgtgtcttacttgttgagttactaactccagccattacataaagtaggctggcattatgatgagcaaattactcaagaccacatgttagctcctttttcttttctccttattctgaaaggcaaatataggtccatcttggtgcttctcatgtcataagtaagctgaccccctccttttccagggaataggacaataatccaaaagtgagggttttacatgttgggatttgtgaagtttcttattttacttaatagccgagtcagtgttacaatacatagtaccgtgttacaaaatagtatgtaacaccaagcatgtttatgtgcaaaattgtgcaagactttgttgctggcacgccaagggctgttttaatgtagtttacttattcttttaggtttttcagatgacaatcataaagggaattaggagtgtttttattgtagtcaatccctattgtgctacaacgataaaagaaaaaagcacaagactagaaggagaagtaatgtctaggaaagactcctcacctggggttgctagtcacctacacatcttagaaggcatcaaaccaaagcttattcccctcgactgttttcgggagaaaagaagacaaaattgtttctaacttatactttaccagtttcactacagcatcagaaagaagcaaaatatgctcccacaacacggcgaacctagctttccagatgtgataaaccagaccagcaaaatgattattttcactagagctttgagtctattttttcggtttttccccttcttcctggtaatgtcacgccaccaagccatcatctcaattttttgagatttgacgtaatcgctcaaatagctgagtaagacacttcttgctctaaatactaataaaaaagaggtgaatgtgggtctcagccatgttactcaaatcggataaagtgtctactcttattagggtttttgggtgttggactcatccatttttttttgtaaaatgtcaagattttggtttgaaatgagagattcaagtgtcgtgacatgagtcggcacgcaacacttaaacgtgtcgaagtaacagagggtctcagacaatcaactttaatcaatcacgaaccccaaaatttatgcaacctttgctcatattcagtctctgtaaagcactcaactgcagcacacccacccattcgcttcacctacagcaggagggcacccaagtaattgctatgatgagcgaattattctgttttgccttgctggaatattgctgttagatttgctgactcactggcagttaattatagtcagagaatgagaaatatcctgtagagagagaaagggtatcttttgtatttagctctataaatagctaaggaagggaagggcattgagagtttatgatattataataggagagatttagcctctcgaatgctgataggagcgtagctcttgttggattatcaatactactctgtttgctctatctatttctactcaggttccttcttgtacagtggatccctgattggatttacttcatcaaccagcagataaaattatttgtaggcacattgaaaccattccaaacctaatgaggccaaagtttatcacaaagaatataggagccaaatgtaggcaacagataagagtataattgccagaagttgaagactccaggtattgttcagaaaccttaatgcatatcatcattctgacactagattttccccggagccaactaacaaaaatgaattaaagagattaaggctatgtttagttcacctgaaattttctgatctgaacttatctgatctgatctgaacttattttttctgatctgatctgatctgatctgaaccaatctgattacaagatcttatcttttagatttttctcaatatataagaaaaaatatagtcatgtggggtcttgtttgattcgtctcaatgagtactttattaatattcaattattataatttttactaatatgtaatgaaagatataatgatttttaaatataagcatgatctgaactgatctgatgtgaacttattttttctgatctgatctgatctgattagatctgaaataagcaaaaataaggtgaactgaacatagcctaagcaacaattgagggaaaataagatcattatggctaagataagataaatatgtaatgataaaatcagagtaattatatcagttacactctcaacattcgtcagattgaggtttcctcccaaaatgccaacccacttttctgtattttcacgtccttctctctacccttctaggtatatattacatcagctgtaaaatttttgaaccaactagtagaatactgatctaccctcaactgcctcactttctcattttttctgggcctttttctctctagcacaagtccacataagtgatgcatagcagaaatataattccactagtcatcctcaatattgatataacaaacacatcacccacatattatcatttttaatcgctgcatgcgaggcatacttacccaccaatcaggatatgcataacagcgttcctaattccaaaaccaccatatatcttgggtttgcaactctcatccctagcaacaaggggactttctgaaaaagtggcagattccgcccacaagtagtttgtacggacacctttattatattattaatatcatatttcggcaacacaaattaccagcccagtaaaacatgaattgacatgagactaacaaggggcccaatctaatatcgtacgtctgtactaagcaatgtataaaaaaaagctcaaggtgcattgatgcaatagggatcctaatgtgcataggtgcgcctcattgaagtgaggcaccactaaggataaataaaaaagattgatgtaaaattaaattgtgcaccttgggtgcgcctcgatgaactttttttgtgtgcctaagtgtacctcaagtacgcctcattgatatcgcctcgcctggcagaaaacgagcttgaccccaatcgccttgctccccaccgcctaggcgtgcctcagtcacactttttaaatacattggtattaagtactcagaatggcaaaaagaaactttgggcattaattagacatttcactttttgtgcaactatttgtgacttcagagattgatatgttttctacattacagacttttgtgatggctgcatggtctccactgtcaaagaacattagtttaagtagaagaaatattgctctattaccttcctccctctacaaacaaaatcctaaaatgtggttatgtagtgccaattcaaacttgtagatgcatgactaatgctttcattatgctgtgggtttttatactatgattcatgtccaattacataacaattagctggagtcaggatatgtcacggaaattttaagcctggcaggatgattgtttatattttctctttttcggtgtttaagtcaaagtaaacttctaggctgctcttttataggctagttgggctgttggggagatctacacattaagtgtgaagaaatcttgtctaactccagtttggttgagaactgtaagctgtcataacatttgttgcatgatgaggccttgtgggattatcatgttagctgtaaactctaaacttacttgaaatctagtgttgtgtctccttatttctgtagtcaaaattgaaccttctgtacgtttttgatacctgcgactagaatgatggaattctgaattactgatactattacaaccatctgctaagaacgaagatgactcttagctaatttctcagcagatttagagaaattaagaagaattactaatgaatatttaaagagaaaactaccaagatatgattgtattgatgaaaaacaccaattacaacctaaccaacattcgagaggttggagctctcccaagtaaccatttctctcactaaacttatcaattttcaagatgccttttccattctcagttcctctatatttatactactccccttagcaaactacccaacttattccccaagtaaactaaagagataatatctaaaatacccttccccctacaataatattagttcttagcattaccggccccctaaacttccaccttgtcctcaaggtgggtcgtaatcatcactaaattctgggcctctactcgtatattcagtgtcttgcagcccttcaggccccaagcctaggttatgcagctcgtgttgcggctcctcctcatatagttctctggctggagtgagtgcctcaactataatgaaaaagtcctggaggtggggaaggaaggagtgtctgaaatggtgtggtgtgctgctggtgttatgggcttgtgcctgaaagttttgggtttaaagagatggagtggagaagagtggagaagtgactggagacgtaaaagaaggaatcataatttttgtaagtggtgggttgaaaaagttggtgggaagaattgtttttataaaatgtagtgtaatggtcgaaaaatgggtggagtaagtatggtttttggctggggatgtggtactgggttgaaaataaataggtctgagcttacttgtaaaattggcctcaacatgagcaggcccaatatcttgagccaattccccaaaagctggcaatagagcactcttaattgcattgttgtgggccatcgggctccaaacatatattcggaggagccggacttctttggtgatgtcattagcttggcccattgcacactttcccttaacagcctcaagatcttttcccacttttgtaccccaaccacgtggcttcaccatcctttctttcttgcttttgtcacttttttggcaatatacgagtttgtccttactaccctcatcttctaatgttggcttcctcaccaagcttaatttctggaattttgtccaccaaatcccaccacccatcgtcaacaccatacctatctacaccggccaagaagcctggtcctccacccgaattttcgccacagacaaagcctgaacaaccgtcagttctctcaccggagaagttcacaggtccaccacctgacccactagttgctgatccacccttcacaaatctccctcctctggctgccacaagtagtggttcctccgtaatactcatatttctcgtccaagagccctggaccaccaccggacccacttccaccggcaccaacttgttcaaatgatacttctctttcttttccaaacagcctacttggactggaaaaaccactgcgattgtagcctccgccagatctgtagcctagtgcacctaacgtgcttccaactgcaacccaatagggatggaaatggatgggattcggggagggtggagcatcacccgcatccgtcacccgcatccattcgctccacccgctccacccgcatccatccatccgtcacccacgggtgaaacgggtgggtcggtgataaacgggtggaaccatttagggggtgtttggtatcatgtttttttacaaaagaaacagaatcaagtaacaaaatccgtttctacttgtttggttctatgttgctcagactcgagtacccatgtccgacacgggtacgtgtccaagtgtccaactcagctattttctagaattttttatattttttaacccaaaacaaagtgtccaagtgtcccacccatgtccgactcccgaggatccgacacgggtacttgaggtgaaatgaagagtccgagcaacggaggtttggttagtgtgtaaagtaacaattaccgttacttgaggaaaacacatccccccaagttgtttccattcaaaaacctaaggaaacaaataacgtttcactcctcaaacaagaggaaagggaatgggttatatttatttccattccattaggataccaaacaactaataagggtaacacttattattatcctttcccctccttatcaaaatcctttccattccgtttacggtattcataccaaacacccccttagtatattttctaatgaaatttgtgatatgatatgcatgatataaaataattctatcaaaaatataaaaagtaagtaaacttacatgtacaacttaatagatgggtgatgggttggaggttaaacgagtgatggatcgggtgacgggtgaagaaattctcacccaccactcgctttccatccatttaaattaggtttttcatccatttaaaaaaccgggttaaacaggtgatgtatgatccatcacccatttccatcctcaaacacatcccgatttgtttactgcaccaccagatccaccagtataaccacccgaaaaatcatcatgccttctactagccttgtaacctgctcccggtgagaagcttcttccacaagtggtggtcgctggacctccatctccttcttccccaaaaaattttccatgacacccactcgacccttcatctgtgacaacctcttcttcgtccacctctgaagttttggggtcgtcttcctcctcaagctcctcttgaagtaactttaacttccgttggatgggagagaacgcttcattgattatcttcaccagatcttcttgaagtttctcgaaactttttctcacgttttcctctacctctttcgtgatttcctttccgatctccttcatttttagactaggagctcttgcgattccatggcagatttctttttttaaaacaagaaaatcaggcacttaatctcccagaatagtggtgctctgataccattttctaagaaccaagatgactcttagctaatttctcagcataacaacaaatttagagaaattaagaagaattactaatgaatatttaaagagaaaactactaagatatgattgtattgatgaaaaacaccgattacaacctaaccaagaggttggagctctcccaagtaaccatttctctcactaaacttatcaattttcaagatgccgtttactactccccttagcaaactacccaacttattccccaataaactaaagagataatatctaaaatacccttccccctacaatattagttcttagcaccatcaaactgggatggatggttttgtaaggttccaatttacttctccatcaaaatattttaggattttttatctcatgtattttagagtttcctcgtccctttttatctgataagattcttctgatgatttgattttatggtaggctccaatcagcaatattaaagaactgaagattctgaaagctggagttccattttcacttgacttcattccagaggtttgtatttttatagtggttagacatgcttcccctagttttcaaagtaaaagcatccttgttgtgacgatattttttcccttgtttttgtttttattattatcatcacttatttccattttctattttccatgctgataagatgttcatcaccataatcttgtggtatcagaagtgtttagtggagtttattcactacacatgcagttgttcttttgccatgaccgccattcattttctcgtcaaaacaaatctatgaagtttggttttcagactcatggttcttgtagctcttgtgaatttttttttcttctccttgcatgcattcttcaaattacatattgcatataccaggtgctctcctttattttatatttaatttttaaaattctatcatatattttttaatgtcaaacctcaaactaggggttcactgcatcttaggcttaccaggctaatatttctttacttaaccttttccctttatatttgctatcctcttgtgtagtaatcaccataagaagggtacaaactaaattaccctcccattcttttgtatcattctgaaatagtgtcacagagctttgatttttttgccctcatttaatctggcaaatgttctctctatttttttttttttactttcttttgacgggattctcaggcaattgttacggggagcagccagtcacactgtttctgtttattatgcaggtgagttacctgcccctctctgttatgattactgcgtttaagaagaccagcgttacaagacctcttgagggcttcggagttcttatcccttcgaatgagcaacataatggactgaagactctcggtaattgtctggttcacgtgtgtagcgaatcagattttcaaaccctgatttcgtaacattgcaggtactctgttttcatctatgatgtttccagatcgtgctttctccgatatgtatctctatactacctttgttggaggaagcagaaatagagaacttgcaaaagcttcaacgtatgagatatgcaatgttttaaatgtatgctatagtcatcgtttcaaccttttggtgcctttttcttactaatttatcctcctggtttaatgatcttagggatgaattggagcaaatagtttcgtctgatctccaccagctgttgggcactgagggaaaacctacttttgtgaagtattgatatctttcacccaacttaacatgatttgtgcttataatatgttaaataaagtaactgaaatcctgaaattaagactacgaaactgtatggtgacagtcatttttactggaacaatgcattccctttatatgggcacaattacgactcagttctgagagcaatagaaaagatggaaagagatcttcctggacttttttacgcaggtaatctgtcatttgcttgttgcgataaagttcatgtacagttggcatatcaatcaacttgcattctttcttgctaactccaaacaatcaggatcattaacttgtaggctgcagcaacagagagtatctcccaagttgttaggtttcatgtaacctcgtcgctgagatgaaatttccgttggctaaaaagtgaaagttttgtattgatgttacccaaaacaaaagtattttgcatgttgcttgaagttttggttgtttcagatagtacatcctttgacatgaaaataaatggaaaagcgtatgtcaagcaattatcatctagtttctttgtttctagatactagccgcatttgatcccagatcatttttgaggaagtcagctgaaataccgtagctatccttcagttttcataataaaactttaatggatctgatgtacagtaatttagtgtgcaccgggttaataattgatattaacttcatatagtgagtcttataaagatataatgaacttatatacaatatagtggattttattaatggaaaacatatagtgaaactatatgcaatatagtatgatacataaagacttagacaacaagagcattcgaaattacaaagaacaaaggaaagaacaattgtatcaaaccggttcgaatgaacaaacaaccaccacttccacaatcaatgtaccaccaatcaagactaaactataacaatgagcttctagtttaagtctactttgagttttaatcaccaattcaacgattagatgatcaaaattgcaaaggttaagagttggtcaaacctaaccaagagttacactaggcacatagctttgttaggagtatattagtttatgaattctagttaagttagaaatccaatacctagttggattaggattcctaattggattagaattatagtttagttagaattctagtaatagtaggcgtgtgattaggagatataattagcttaattcttatattgttagtttaattcttatcctcgttttaggtttatctttagtcgaacttgtaccctatataaggggcctttatttcattaataatatagtttattttgagtttaaacctttacttgtgattgtttgcttgagaggttattaatcgaaccattaataacttttcaggattgttaagtttttagtgttaaacatcttaatttcaggagtgattttaagagtgtttagattcttgtattcaagtttcaggactgatcttgaatcaagaaatatccctagtttcgactaatatcataagtagttcgaattcttggagtcttttcttcaagattcatattcataacttgattatttagacttcttggttttgtaatcatatcaagtggtatcagttttccagggaggagaggatacaaagggttctctttgatcaaagaagatccaagggcatcaataagaatgacacttgcaataagttcgagtgatacaaacaacttcaagactcgatcttttgctaccaagaaccaatcttgacgcctgaagattgttaggacaaaggataagaagtgtttctacatccaagattgcattctttacgtccaagattgcgtcaagatccattctttaagttcaagaaaggagtagaaagcattcgaacactacttaaacatgacatccgagatggataagctggctatggccatgagtgccttggcacaatcacaaactgagtcacgcaaccacatgggtaggatggaggcacgtgaccgtggattgaaactagatgactatagtggagatggcaatccagaagacttgttggagtggatttgccaactaggcaaagtgagtgattataggggctttgatcacaagaagagattcaaggttgcttccattaggctcacgaagtatgctggaatacggctcgaaggattgcatgcacaaacttcttgcctaatgactatgaacaaaaacagttcataaggctcgcatcaataagccaaaacacacttagtgtacacgaatacagcatggagtttgacaaattagggcttatatgtgacatagaagagaaagagcaatacaagattgcaatgtacattaaagggttgaatcgatatatagccaagaagatcgaagtctcaacttatcacttctttgaggatgtgactaaattggctaagaaattcgaagagcatgacaaagaagaagggcctaagagttcttacacacctaagtatgactctagtgctaaagggaaatcaacagttccctactcaaggtggtcggaaagacctaagaaccccactacacctaaggaggacactagcatggagaagacaaaagtggccgtacctaaggagagtttaattttgtgttttatacatctttgcttaagagcttaacaattgaaactattaataacttttcaggatggttaagtttttagtgttaaacatcttaatttcaggagtgattttaagagtatttagattcttgtattcaagtttcaggagtgatcttgaatcaagaaatatccccttgttcaactattataattgatcttattcgagttcttggagttaatttcttcaagattcatattcatacttgattattagacttcttggtttagtaatcatatcaatatcattagcattaatttacccccagggagattaagaaaggattagcctaatcaaggcgcttaagaagtttttaggaaaaatcgtgcttgttaagcttaagaattgaacttctttcaccatttgcccttgattctcttgttgaactagaagatcttggttcatagtagatgctcctgcatcatagtagagcatttaattttaattttttaacatgcacgaagatgtaggtagtgtagtatatatcgtgagacgtggtttaacatatagaaagatgtagtttctgcatgatatagtgagtttttgcatgatatagtgaatgtctgaatgatacagtggatcgttccgaattgttgtagtttgtatgatatagtatttttgtgaatgatatagtgagtttcttcatgatacaatgggtttctgaatgatatagtggattgcttagaaatgatatagtgagcttttgtatcatgtagtaggtttctatgtgatataggttgttaaaagatgatacatgcttttggcctcatgtactctaatgttaacgtgaacccggtccttgcaagtcaattgcagttttttcaatattaagctatttttttttttttttttttttttttttttttttttttgtacgggaatatttagcatctttaccacaaacataaccatacgaatattatgcggaaattccagtctgaagtcttaacttttcaaaattaaaagcttctatattatttttggaatgaaaaaaaatgagctatggcatgttattttgaaatacaatgagtctcaaggtgcatagtggcttcaattctacgaataatgaatggactactgatttctaattttttgttccgggcttttgcattaggtaaccataaagatggactctctgtgggaagaactatttcctctggatacaaagctgcggagcttgtgatatcctatctcaactctacttaagatgcctaaatgatcgaggagactccgtaagtcctttctctgattctatctttgaactgagtggaaacacgactgtggtctaaagtagttgatgtctcagatatccagaaatggcgttagtgatattcaggagctgtccattgaccctttgattcattgttgcagtttactgaaagttgttagctggtctcagaaaaacgaaaggaaaaaagggggaaaacaaaaacaaagaaacgtagattgtggtgttaaaatcaagaattccagagatttgtaccttctttatcagttgaattgtttacagtgtgaatcaagaagttagctcgaccttcttttcttgtgaatggtaagatttcgtgatcatcaatacttgattgtgctgtttgcaacttcaacggtaagatttcctgatcttacagtttaattgcttgtgctgtttgccactt

SEQ ID NO: 103 - DNA, 1575 bp, synthetic construct
  source 1..1575: mol_type = other DNA
atggtaatgctatacgattctcacctctcaggagtctcaactcatcttcaactatcgcaggcatttcccaggaagaacccattaatggccaaagtgtctgagccgggtaaacccacttctgctaaaaggattgctgttgttggtgctggtgttagtggacttgctgccgcatataagctaaagtcccatggcttgagtgtgacattgtttgaagctgatactagagctggaggaaaactcaaaactgttgcaaaggatggtttgatttgggatgagggggcaaatactatgatagagagtgaagcggaggtcacgagtttactcgatgatcttgggcttcgtgagaagcagcagtttccaatcgcgcagaacaaattatacattgcgagagacggtcgtcctgtgctgataccttcgagtcccattgcacttctcaagagcaatatcctttcagcgcaatctaagctacaacttatgttggagccattcctttggagaaaacgctatgcttctaagatttctgatgagcatgctcaggaaagtgtgggtgagttttttgagcgacattttgggaaagagtttgttgattatctaattgatccttttgtcgcgggtacaagtggaggagatcctcagtctctttctatgcgtcatgcatttccagaagtatggaatattgagaacaagtttggctcactaatttccggattaattcaatctaaactgtctccaaagaaggaaaagggtggaggaggaaagccttcttctaatgaaaagacacgcatacgtggttcgttttctttccagggtggaatgcagacacttgttgacacaatatgcaatcagtttggtaaagatgaactcaaactacagtgcaaggtcctttcattgtcctacagtcataaggggatcccttcttcagaaaattgggtcgtgtcttctgtgtcaaaaaattccattgaagatcaacaatatgatgctgtcatcgttaccgctccaatcagcaatattaaagaactgaagattctgaaagctggagttccattttcacttgacttcattccagaggtgagttacctgcccctctctgttatgattactgcgtttaagaagaccagcgttacaagacctcttgagggcttcggagttcttatcccttcgaatgagcaacataatggactgaagactctcggtactctgttttcatctatgatgtttccagatcgtgctttctccgatatgtatctctatactacctttgttggaggaagcagaaatagagaacttgcaaaagcttcaacggatgaattggagcaaatagtttcgtctgatctccaccagctgttgggcactgagggaaaacctacttttgtgaatcatttttactggaacaatgcattccctttatatgggcacaattacgactcagttctgagagcaatagaaaagatggaaagagatcttcctggacttttttacgcaggtaaccataaagatggactctctgtgggaagaactatttcctctggatacaaagctgcggagcttgtgatatcctatctcaactctacttaa

SEQ ID NO: 104 - DNA, 37006 bp, synthetic construct
  source 1..37006: mol_type = other DNA
tattccatcgaatgtagcaaattgactgtccgttgcaatttcggagtttccactcgtcgcatggtaaatggtaatgctatacgattctcacctctcaggagtctcaactcatcttcaactatcgcaggcatttcccaggaagaacccattaatggccaaagtgtctgagccgggtaaacccagtaagtcaaacattcgaatcacaactcaagcaaatttgtcttgtttgcgttatattttgctcatttcagccttttttgtttttccgacctttgcatactgaatattgtgtgtgtgtgtgtgtggggtttcagcttctgctaaaaggattgctgttgttggtgctggtgttaggtaaattttcgtctcttgcagagtttttgagtcatttgggaattctatgtgaaacttgtaactcccttcagtccaacgaacgcagtacaattttctatcaaatcatggtcctaatttccaattttccatatatattgttggaattatattgggattgtctatcactattaatagtattaggatcaattgtagagaagcacagaaatttttgggatcgaaagaatatctggattgccacattaacagcagatataattcttccaattggtttttggttcttcctaccttgacttgtctggtcaaacattataaactttaacctttaatatccattaaagtaaactataggatttttttgtctaaaacatgcttatataacatgaaatttgtgagaaaccaccttatatatatttttttgcgaaaacaaaccttaaacaaaattattatcgtgagaacaaaccttatgccaatttcgatcattgacccaaggttttggcattgaccgtgtcatgaattttgttgggtttaaaaagtcatgtgtcttgcatacgaaatggtaaatgcgggaaccttgggtcaatgtttggaatccgcataaggtttgttctcccaaaaaatgtttttgttcaaggtttgtttttgcaaaaaaacttatataaggtgctttctcagaaatttcatgttttataaagtagtatttgacaaaaaaccctaaaatatattatagaattattattgactaaattgtgtaaaaatgtactcttctaaaagtacattatagtattttagtggaacatttgcgagaaactactttataaatacgatttttgcgagaaatttcctaataaaaaaatgtgaagtgcaaaactatcttattgataattttctactccctcaaatccaaaatactatgaagtctttcctttctggtttgtcccagattagtttgtacgcttccatctttggtatgatcccacttttattatacttattagttttacgtgagttccttactctatctcttttaacaaaaatactcaactatctctatccaataaaaagttccttactagtcctatcacatctgctttttaataaaataacgtttgataaccacacaacttatatccttaaaatacacgttcaaccaagtgttgagattaatttggacggagggaataaatattttttgaggcatattggtagcagtattcggattccgataggttgactatgtttccaatgttgaccaacacttgccttgcatgtaattctaactttgctcttttttattcttcatttccctcgtattccatatacaatgtttagagacccattccttcctcttctcttctttcccttccttactatgctttgccataatcttcctcaaatgagtgcaaattaatttgtcgttgatgtaggccaactgattgtagcacatcttcatagttcatacctcaacacactcgtaattatattataccctacatgttaaatggctcatgaagctttattttatatcatacttcctccgtttcacaataagtgtaacacttttcttatttggaataatcacaataagtgaaaccaagctccaaatggtaagaaaagttcactcttattacaaatataccaccaaaaagtaagaggggatcacaacttcaatacttcttcactctactttattgtggtcccaactttctctctctaaattccttggtaactccccactttctctatgtttcacttatggtgaaatggaggaagtattttgtagtggtatttagctactaggccttggatgatatacaatcatacaatgtatttatattcacgataatttgctgcccaccttgattaccatgatttccaccaattttatcaatttcagtacttcaccaccccgaatttatattttttatttccaaccttggtatctccatttgtctgagtgcccgatccatttgtatcgcctccagaattgaagaagcttcctgcagctagacaattaggaaggttaaaaaagtttggagatggtggaggatagccataataatcattgttgggaggtggaacttggaaggttattgtagggttgaagtccttgatgaagaagaattgagttcaaatgagaggaaaaaggagcagggaagagggacaataagaaaaaaaagggtaaactaaaatcacgtgtaaggcatgtgcagatcaacatcagaaagcatagtcaacctactggtattagggcactgatacctttttgggtcaaaatttttttacaaggtatttcatgaggtagttttgtccatttttttttttacaaggtatcgtctcattttttttttatcatttagtttctcgcaataagtgtatttcatgaggtagttttttccaaaatttcctcatttattataaaatacctcatcttttccataaataatgcaatgtctagacttttacgctgtttacacatgctcctttgaccatctattgacacacaaggaaaaatagagtagagtcatgcaggatcttgttagatttttctcgatatatactttcaaaagatcaatttttttataattttttttttgaggggattttttttttataattatgtacttatcaaaggtcaaagttgtgcaccgggaagcataaaactctatgtgttgcaatttacatggaaggggaggagtataataagagaaaattatggtaaaaggttcattcctggagatcatgagaaaggaagtagaaagaacaaaaaagaacaatgggagtgcttttcaatgtttgttgtacgtagcatttattcatttgctataatgttttgtgacattgtagtggacttgctgccgcatataagctaaagtcccatggcttgagtgtgacattgtttgaagctgatactagagctggaggaaaactcaaaactgttgcaaaggatggtttgatttgggatgagggggcaaatactatggtaatgtttttgattattgcaggtcttgcactttagcgcacaattaatttctggatttttttttgtactgtggtggttatggtcatcaacatgtctcacccactgtgcttgcagatagagagtgaagcggaggtcacgagtttactcgatgatcttgggcttcgtgagaagcagcagtttgtaagtctttcattatctgaatggcacatactttatttcgaaagattgtaattgccttttctttctagatggcttcatcttcatgttgctttctgattcagtttcgtggctaactttccaagtttgtctgattgctaactctgtcatagccaattgcacaaaacaaaagatacattgcgagagacggtcgtcctgtgctggtaagtttgcttgttttacttttgacctcttttaagatctttcaactctggagcctggaaacatggtgatgcaggaggcaagttctctctattttacatcctttcttctctgtatcttatgacatttgcctcttattctgtgcagataccttcgagtcccattgcacttctcaagagcaatatcctttcagcgcaatctaaggtcgttttatgttaagacatacttgatgctgagagtttattgaattcttaaccttcttcttattttttttttatttttttagcaaaaggtaagtatattgcatttaccaaaaaacagtatgtacaccaccacagcagccatgtcagaatctagaaataccaccgaaaaaatcctacacccaaccagagacagttatattatatcctactcctaagtttctgtacccaatttacatcaatattggtccatttacaagatatttttataattcacagaagcacatcagttttaattagtttaataatgacctctggatgaataaccaactcagaccatatagccttattcctggctttccggaagttgtacgccagagcagcaagcacagcaatgcaaacctgtttcttatacctccttttatgtgtcttagcccatctcttatagctagtgaagatacagtcgtgtgcacaggattgaaccccaatccaactagcgaaagcctcacaacattatgactataaatacatctgaagtataaatgctgcacctttttctcctcttgcctgcacggtatcagaacaaatcccagctttagctaacaattccctggttttcagtttattcaatgccatcatgcaagcaatgaaagaatgttttggaacattcagtttgttccaaacacagtgagagcaagggacctttcctgcagttccacttagccacttatatccctgactaatagtatgactctttgcaccgtaaattgatttcaacttaactttttcataagcagtgaattgtgtgttgttagagtgtctagctgtctaggagattgggagaaaaggagggaccaaggagatagaaacacacctttgtgtttctttgtgtatttactttttagggtgggtcacgttttctgagaaatttgggaaaaggaagaaatagtaacacactttcccatttgtataacctgtatactggagctccaatataatttgcatttttttttgagctgcaagaatatgttgacaaacagttattgcttcttcctcagctacaacttatgttggagccattcctttggagaaaacgctatgcttctaagatttctgatgagcatgctcaggaaaggtaatgtcaagacatgtgttacctcgccttaattttcgttccaggaggtgagcatgcatttagaactaaaaggcacaaagactgttggtggtcttgcctgttcaaatataatggagaggagttttcgctacatttaccctctcttgaagtggggttgaaatatagcatcaagttgaatgcttgattaagtttaaaggacttgtgtaactctttttctgtttactgtgattacatgacctggttgattaacataatggtctgtttatctgtagtgtgggtgagttttttgagcgacattttgggaaagaggtaatggtttaccatagtatttctgctttagtggtaaattgtaatgttgctgataattatacttcgctgcagtttgttgattatctaattgatcccttcgtggcgggtacaagtggagatcctcagtctctttctgtaagtgaacattttgtgcttcactcccaattttttggaggctggaaatagattcttttccagttgttctgtcaaaaatagatgtagctttattttgaatttgaagttcccaattgttcattttgactattactgattattgctaagagtggcattatgctattatgctcctaaaagaaaggtgaattttgacctacatatagtataatgtatcaatattggtttaattgtttgttcttttgttccttttggtgctcatcttgcgccttgttctcatcgctcgttttttcatgttgcacttgatttaaatttgctcagcttaacttgtctttttgaatttatattacttattgctatattttactaatttcgttgaaactaattttttgctgaacttttcgttttgttgaaatcatttttctgaattaacttgattttcctgaatagaattgaattttggtgatcttaccttttctgcagccttttatttctttcttgtcctttttccaatctcatttttttatatttccattgtgttgacatcttatcattaactgtgcagatgcgtcatgcatttccagaagtatggaatattgagaacaagtatggaccataagacgtttattttaatcgacatgtatgtttcttagtttatacatatattaattctgtggtaaaaaaaccgaacaagaatatctttttttttttctatcatcaaaaagggtgaatatatgtagaggaaaaagatttgaatcaagatattagcctaaagcaataataatgttagtaatagctttaataacaaattcaaaacgtacattaatgaaccgagaggccggaaaatagttaaagtgaccactaagagaagcgaaggattcatgatgggttttcaacccagtagggcaaatttgttcaatgttctttacaaatcaagcttattaccttgtgggtgtttttgctagagatgaatgatagaattttccctagttggaagtcttttttggttactttatgggagctagtgatgtaatttgtttcgccttatggcatttcctaacatgtgcttttgtgatgtattgaagctttttttttgccttaatttatgctggattttaattttgttctttgtttcatttttcttgcttttgaaaaaaatatatagatatgtatatattaggattggtcgaggattttgagggaagggaaagacctaagaaaacttggatgagggtgattgatagtgatatgagtctatttgggatcgaagaaaatattcctttggataaggtgtagtggagggttgagggagcaaatttatgcagattagcttgacttaaagtttttctttttgattatttttcatttacttgtgttttgcaaacatttactcatgaatgatgtaaacttcttcaaccaaatctctggaaaaaaataatctacatggaaaaaacattattaatgttaacttgacagagatcccatccttgtgaagcagctagcaattaggcatctaacaattgacattttaatggacaggatagaatgtctcttgatagtcaataccctctgtttcattgtatcccatagctactaatctagtttgtatctttccaaagaaccattattttgaagtttcaccttgaacacccattttgaaccaatatgtttcttgcccttggggagaggggctaattgccatgttttgatgcggatgcaaagacacttgttctacctgagcctattgacttgatcatggatactctagggtttgaactcaagggaaagaatcaagtcttggcatgtgtggtgacatggcgtggggatggagtaaagaagagtcatagttctgttaggatatgttcttgcttgctacatagaatcgtagttctgttaggattgctatgatattatatctagtagatagattttatagttaattaggataaacatgtgatgatcatgttataataggcatgtgattagaggataggattagcttaattcttatcttgttgttagtttaattcttatcctagttttatgtttatcttagtcgaagttgtagccatataaagggcgttccattcattaataatacttagttttgctttgtgttttaaacatacttcttgattattgtttgcttgtgagctaactaatcaaaccattaaagacttttcaggagttttagtgctaaacatcttaatttcaggagtgattttaagagcgtttagtgatcttgaatcaagaaatatccttgttcttgttcgactaatatcagtggttttgttcgagttcttggagttaatctcttcaagattcttattcaacttgattgttgagcttattggtttagtaatcatatcaagtggtatcagttttccagggaggagaggatagataggattctctttgatcaacaaagatccaagggctatcaacaaggttcaaacattgctgcttgttcaagacttgatctttttctaccaagatgcattctttacgtcacaaggtagtaataacaagattaagagtggtttttacatccaagaatcaatctttcacgtccaagatttcatctttcacgtctaagattcattctttaagatcaagaaagttataacaagcatagaagaacacataaccatggagtccgagatggacaagcttgccaaagctatgcaagcacttgcaaagtcgcaaactgaatcacagagtcgactcaatgagaatactaccacaatcaatgggattggtagtaacatgaataggttggaggcacgcatggatgccattgcaaccatcatacaaaagaagcttgatcggaatagtgccaacttcataggtgccaattcagaggaagagttggcagaacgtgaagaaagatcatccaagactacatacaatgatgatcgtggcttaaagttggatgactataatggagatagcaatcgagaagacttgttacagtggattcgacaacttgagaaggtatgtgattatagaggctttgatgacaagaaaagattcaggattgcctccataagactcacgaaatatgctggaatttggcttgaaagcttcaaggcacaacgagccaagaaaggtaaagaaaagttgtgtagttggacaaagttgaaagttcaagcttaaagagaagttcttgcctagtgactatgaacaaaaatagttcataagactctctactataagccaagacacgcttagtgtacatgagtacaccatggaatttgacaagctagggcttatatttgacatagaggagaaagaacaatggaagattgcaagatacatcaaaggcttgaaccgccacattgccaagaaggtggaagtatccacttatcacacctttgaggatgtgacaaagttggctaagaagtttgaagaacatgagaaggaagagaagcctaagagttcttacacgcctaagtatgatactaatgctaaggccaaggctagcttcctactcaaagtggtatgaaggacctaagaggctaagaacctcaccccacctaaagaagacacaagagttgagaagcctaaagtcgtcgttccaaaggagaaatttgaagagatgagaaagtgcttcaagtgtcaaggaaggagacacatagcaagcaattgtcctaacaaaagagtcctcaccatgagacaatacctagctttgcaagaagaggaggatgtctattagttcgtccctgatgaagagcaaacttaggggaagaagaggaggaggatgcttttgctgaggatgatgcaaggctagtaggggtcaagaggcgcaccttacatgtcgaccatacacctagcatggagcaaatggaaaaatcttttccacactagatgcaaggtaggtgactatatatgtaatggtataatagatagtggttcttgcactaatgttattgtatctgaggtagtgtcaaagctaaacttagctacaagggcacaccctaagccatacaagttgagtttgctagatgatagcactggcatgagagtaaagaaacaagctttgatttcattctctataggggttataaggatgagttatggggtgatgtattgcctatgagtgcatgtcatctcttgcttggaagaccattgcagtttgataaaaaggtcatccatgagggggactctaatgtgtactctgtgttggttggttctaagagggtatgtttgcatcccttagctcctcattcagtggcgccaaagcaaccacctaagacaccaagttactttctatcttcaagggagttcgaacaagaggtggaggaagaaggttgtgcttatgccttgattgtaagacatgctgccacaagtgtcaagactactagcaatgagaagctcgaagccttgatgaaagagtttgaggatgtctttctagaggaactacgacccttgagaggcatagaacatgctgtagaccttgtacctggcgcccctttgcctaacaagcctgcttataagtgtgatccagtggcatctagggaattgcaacgccaaattgaggacctaattgaaaagggctatttaagggagatcatgagtccatgtgttgtgccagctttactagttcctaagaaagatgacacatggaggatgtgcatagatagtagagcagtgaacaacattacagtcaagtaaaggtttcctatgcctagattggaagatatgttggataagttacatggggcatcaatcttttctaagattgatcttcgaagtggctaccaccaaatgaggatcagagaaggtgatgagtggaaaacaacattcaagaccaagcagggattgtatgagtggatggtgatgccatttgccttatgcaatgcgccaagctctttcatgagcttgatgaatgaggtacttcgtccgttccttaacaagtttgtggttgtttacatagatgatatacatatctatagccaaaatgtggaggaacacttgttgaacttgcgtagcttattcatgaagcttagagagcaccaactctatggtaagattgatggcgacgaggttgacgggggattatggcggcagtgaatcaccctctttgccggtcactgaaatacaacctgaggtatctttaaattctgtaattggattgactaacccaaaaactatgaaattgctgggaaaaattgctggatgtgaagttgtggtgatgattgaccctggggcaacccataattttttatcactagctactgttgagaaattagctattcctgtgtcggaatcggaaggatttggggtttctctaggggatggacaggcggtgaggggtagtggaatttgtagaggggtgttattgagtttaaatggtggagttgaagtggaaacagattttcagcctctgggtcttggtaattcggacgtgattttgggtgtacagtggctggagacgttggggacagtggagagcaattggaaaacacaaacaatggggtttgaaatcgagggtgtcaagttcactttgaaggtgacccatcactggcgaggtctcgaatctcactcaaagccatgatacgtaccttatgtaaagagggtggaggtttgtggcttgagttgaaccagattgagcattatcaggagaaaacaccgcattcatcagccttacctgaaattccagttttcttacagagagtccttacccaatttcagtctgtgtttgctacaccagaaggcttaccaccgataagagaacatgaacatgcaatagttcttagagaagggtgtaatccggtaggggtaataccgtaccgttatccacagttccaaaaagatgagatagagcgcctcatcaaagaaatgttggcttccggaatcatcaatccttccacgagccctttctcgagcccggtgatattagtgaagaagaaagatgggtcgtggcggttttgtgtagactatcgggccctcaataaagaaacggtccccgataagtatcccattcccgtgattgatgaattgttggatgagcttcatggggcaacacttttttcaaaactcgacttaagggccgggtatcaccagatccgggttaaggccgaagacactctcaaaacagcttttcgcactcatgaggggcattacgagtttttagtaatgccatttgggttgacaaacgcgccggcaacgtttcaatcccttatgaacgaggtcttcaaaccattcttgcgcaagtttgtcttggtatttttcgacgatatattggtctacagtagttctgccaggaacatgaggagcatttgaccttggtgttgcacaccctagcagctcataaattgtttgtgaatcagaagaaatgtgattttggcaggtcggaagtagcatatatggggcatatcatctctggtcaaggggtggctgtggatatggagaaggttcaagcgatggtggaatggccccttcctaaaaacctccgggaattacggggatttttgggccttacagggtactaccgcaaattcgtacttcactatgctcatatagccaagcctttaactgatcaactcaagagagatgcgtttgggtggtctgaggcagcaactcaagcctttgaaaagctcaagaaggcgatgatcacatcccctgttttggcaatgccggacttccaagagttgtttgtggttgagaccgacgcatccgggtatggtctgggggcagtgttaatgcaaaacaaccgacccattgccttttacagtaagttgttaggtgcccgggctcaattaaagtcgatctacgaaatggagttgatggccatctgcatggcagttcagaattggagatattatctgctgggtcgacatttcctcattcgtacagaccaacagagtttacgtcatctcactcagcagcgagaagtaagtactgccttccaacgttggatgagtaaacttatggggttcgattttgaaatacagtttaagccggggtgtgccaaccgggtagctgatgcattatcccgcaagacagtgggagaggttgaattgggtgcgctgatattaactcatggggtggactggaccgacttggagcgtgaaattgaaggcgatcctctgttgtgcaaaattaaacaagacttccacgggggtgctattactcctgtgcacttttctttggtggacaacaagctgttgttcaagggtcgatacgtgattcccagctcttcggtttttattcctaccttgctgcgagaatatcacgattctcccattggagggcattcgggggacctcaaaacatatctcaggatggctgccgactggtattggaggggcatgcgcaaggatgtggcgcggtatgtgcaacattgtagcgtgtgtcaacaacaaaaaatgtctcaacagatgccagggggggtactacaaccactccccataccttcctcggtttgggatgacttgtcaatggacttcgtggaaggcttgccatcttccaagggggtaaacaccatcctcgtggtggtcgatcgtttgtctaagtacgcccacttcctcccactacgtcatccatttactgctgtgtcggtggcaaatgtgtttgtcaaagaggtggttcgtttgcatgggtttccttcctccattgtttcagatcgggatcgaatttttatgagtgtgttttggcgggaattatttcgtttacatgacaccacactcaaacgaagtaccgcgtatcatcctcaaacggatggtcagtccgaaatcgtcaatcgagctctggagacttatttgcgttgctttgtgggggaatacccgcgctcttgggctcagtggcttgggccgaattttcatataatacttctcctcatctctctaccaaaatgaccccgtcaaggtcctttatggtagagaccctcctactgtgatacgggttaatcggggagcctcacctgttgaaagcttggaaaacatgctccaagagcgagacgcagtattagatgccttgcagattaatctgattaaagctcaacagaaaatgaagagtagtgctgatgctacaagaagagaggtgcattttaaggtgggagatcgagtgtacttaaaattacagccttaccgtcagaaatctttggcttaacgcccttatgagaagttagccgcccgtttctacggaccatttactattttacagaagattgggcaagctgcatacaagttacaacttcctgtttctagcaaggtgcatccggtgtttcatgtctcccaactgaaacaggccgttggttccattcccgtttcagccactattccagagcaattgtcttctgacttggagttagaggtggaacctgatgaactcctcgatgttcgtagtgtttctagaggccagcacacttacttggaagctctcattcagtggcagggattaccatcattcgaagctacctgggaagatgtggctgctttccatcaccattttccatccttccaccttgaggacaaggtgaaactttgggggggtggtaatgtgatgcaccaaactaccactccactactcacctattagaggcgtaagaaaaagggggtaaatcaggaatagtttacaaattctgttgaaaggaatattttgtaattatgatgtcagaggttgttagcaaaaaggcagtagagtaacaataaaaaggggaagggaggagagaagaaggtattgagatttttgtaaggaacttggcccttgggagagttgggagcctctcgaaagctcaccattatcttgtgaatattttccttcctggttatatacaagaaccttcctctgtcaatttcttttctctctaatcttatttcttattctgttttctggttgccattgtttgaagttgcttgttgtgcttgagtaaatacgtgaagtggtgaaacccatctgaattcatcacatctattccaagtggtataatacaagcttgtaatccaaatctaatgagaaatctaagttatgaagaatttcaaaagaactaagtacccttgttttggatgcccaaggatttacttgccgctcaagttaatgctcaacgtgcaagatacaacctctttagtatcccaaggtagtttccataagaattaattgagctcaaatcaagaacaatatttttatgtattaatgtgaacacttcctgaattatattagatatatggtctgaaggttggaagaaagattagcttttaattttaagtttgagatagtttttagaatcgaggaaagattagctcttaacttgtaaactaaggattgctttataagtaaaacattagttatggaactcttaaaattggttttgaacatttctagttaaaaatcccatgtaattctcccaaactagcttaaaatctcacatttcacaagctaaggagagacaaatggcgttctcttgtgaaacaatctaaaattttcattaggctactgttttcaagtatttatatgttagaagtgccgcatataggtacataaaataagtttacaaacacaagtaggaataaggaaaactaaaagagaaacttcagccatacaaaaccggctgaaatcagctactactttctactttctagcttcaaaatctgattgcaagtctcctttaagccaatcaccaatgaaaacctttcctccacatgaagtgtgctcaaatcaagagaagaaacccatcattcgcctatagctacctgggtcagatgaagatacggcaaaaaaaacgctggaaatcagtgaaccaaaataagcaccaattggatgctttctgtccttgctacattttcttctcataggactacttcaagccatacatgaataagcagttagatccagctcctagcatccatttgatcgtacaaatgagctccaaaaagataagtaaaaccaagcagccaaaacctaattaatactaatgatgaattagttgaatagctaatgacgatgaagcaacactttagtaggaatagtgttaattatgatcaatgctacttaatcttctgattaatttttggaaaaatgtcatatctaccttctgtatacacttattcataactatatcgtattattattatttttaaataactaccttttaagtaccaaaacctaagaaatcaggcacttgatggattccatccaaagatccatttggcggggcccactaactgacttttgattttttgcctttcctcttttggttaatctcaatggttcatcaataacaactcaatcttctccccatttcatcaaatcatccctaaatcagaactttttcaaattcacccaaatgaggttatggaaacctctaccaagtttattcgaccacttttagtctagctcaaagttttacacttgcttcaaaaactaagatttattaactttagaaattaggtttttatttttattttttatttaactttgtaacaatcttaaataactcaggtgctttctagagtttggctttaattgtttttcccttggttatgtgaaagaagtatgactactttctccaagactaaagtagagagcaaaaaatgcaattctggaatttcttgcaaaagaaaaggaacgagttaatgataatgaaaaacaaagaaaatgatgagaagagaggagctgaatcaatcatgatcatgtattttaaagttttttttgctattgaagtgacttaagaagaggaaagaggatgagtgaagacaaacaaaagaaaggataaatagagggaaatcttgggcttagaaaggtgaaaaggtaagaagatgagttagtgggccccaacaaatgtatctttggatataatccgtcatgccactgtttggggcttgcttaagtccatacattacttcactaattttacaaaatttattttcttgaccaagaactgaaaaaaccttcagtggtgatctattaggttttggaagttaaaaggtagttatttaaatgtttttaatataaaaggtagttatttagatatttttaatataaaaggtagttatgtgaataaaagtgtatataaaatgtaattttttgacatttttgccttagtttttcttgctaattcaccttttcaacttgaccaagttgctatgaggagaaaacgagcaattattaagcaaatcgcaacactagcattaatccatggcccatgaaactctccataattagagattggattagcacttagtagaacttcttgctcctgctccaggtttccattacttctttatctaagtgcatcaaaaggttgttgggttatgaaaggtggtggttgtgtatagtcattgtcaaaatgttgttaatgcactctatttagaggatgagggattgaatagttttcacctcgtgacctttcattcctttttaaaaaaattgataatgtgtattggtcctatgactgtatgaatggtaataagctatctcatgagctgttactatcttcctcagagtctaggtagaagggtttgggctgataattttctactatgtgcaattagtttgttggatttggatatgctagttgatataggtcctttcccttgggccttctcttaatataggcctacagtgtgattgaagataaatcttctggagaatataagaacaatgagatggattggttagaggttgatttgttcttttggtgtaagactatttcgggttctctattggttatgttcagacgccagaatatgtgttggtgattgttttccatgaacatactttatccgcagagacatttttcttttttcttcctataagattatatttgtttcctctcttggtgctcatctcagtgtctctactttacgttaaactgttgacattacttgacaatgcgtatatttgtcgcatggtgctcttccctcactccacgtcgaccccatacatcaaaaaatgccattaaagaatattcgaactcacaaccttgtgttgaaagaatggaatccctaccaatgactcattaattcattttctctttaagaaataaatgatttcctcacaaacttttaggctttaagagcccaaaagataaaaacataaaataagatagacatcaacgtcaagattagccttaaatgcacaaagcacatgtcaaatgattgataactactcacgagttgcaactctttgggcgttgcctaatattaattggatctcttttaaaaattgttggtggttatggttggtggagaggaccatgtaacttttagctggtcacaactggtaatgattgtcacttttactgcccataaaaaaatttaaactgttgaatatgtttctggcagtggatctgacaaatcctttacaagttggcgtccattttgttttgccatgtgactcaattataatacgtgagttttattatccaccaggtttggctcactaatttccggattaattcaatctaaactgtctccaaagaaggaaaagggtggaggaggaaagccttcttctaatgaaaagacacgcatacgtggttcgttttctttccagggtggaatgcaggtattagcatgtagctttcattctgttaacatttgtggttcttccagacatacatccaatgctttttttttttcttgctataaccataaacattcttgtcatgaacattctttaatactgttgctgagcttagtgtattcgttcattcatgtaatttcctctcttgaggttaaaatggcatacagccttacaacctatatccataatgctccttagagtagaatccctaggttataacatagtaccacttatcaaaataaacatggcacacactgcaggacaagaagtaaatccacctagagaactgagcacctagtagtaaaagcagcgatacattactaataacagtagcagggccataagagtagtaaatgggcctcatttcaacactccccccgtaatggtgagagagaagaagcagtctgaactcccagcttggagagcaaaatagagtgttgctgaacagggagaaccttagtgaaaacatctggcacttgatcttgagatggaacataggtaggctgaataaccccttcttcatttgtattgtccctcaggaaatgacaatctatgtctacatgcttggttttctcatgatgaactagatatgctgctatggcaagagcagcttggttatcacagtagataggagtagcactggactttttaatgcgaagatctttgaggagttgtttgatccacatcacctcacacacagcaagagccatggatctgtactctgcactgaccacaagaaattgcctctttgactttcaagatacggggggagtcaccaaggagcacacaaaaccagatgtagaatttacaacacccatcccattcactatcacaaaatgctgttagttgagcactagacttgttcgccatgagaattcaccctgttggcagcttgaagatgcacattagtggggcagtgcataaatttgcttaaatcatgtatagtgaaggcaatatcaggcattgccttgtaatagtgagataaatgagcttccccatcaatttttgatacacatcaggttgttgaagaggatcaccattgtcagcatagagcttgacatgtgagtccatacgaagcctcaatcgtctgcaatttataaaaccatattcatcaacaagacccatcacatacttctttagagataaaaacgatacttcactacactgatccacttcaatcctcaaaaaatatcttaggccacccatatctttcatgtgaaattggccagcgaagaaactctttgcttcctcaatagttgctaaactattgccagcaagaatgaggtcgtccacatacaccaatatagcactgaaacagtgagagttttgcttgaagaatagagagtagtcacacttggattaagtgaatacattttgctttaaagcagtgttagcttggcaaaccattgcctcaaagcctacttcaagccataaagtgacttaagcagcttgcacaccttagttcatttggtgtcacttctgccatcagtacttagctccccctctccttgaactttgatcctgttacatgtttcactatatcctggtgatagcttcatgtatacactatcctacaattcaccatgcaaaaaagcatttttaacatccatttgtttgcaagaaccaaccctctaaggatgcaacaacaagcatgtggtcatctttgctacaggggtaaaagtctgctcataatctattccatatctctgtctgtcacccatgattacaagccttggcttatgcctattatttgtgccatcagtgctgtattttgttctgatccatccatgtgagggatggctcatttctacaaaatcctagttccgttaggatttgtgttgttttcctaattctagtaggaataggactcctaaaatcctaatcctcctagttctgttaggagtttaaaagttttagtttgattgtaattctagttgtgttagaaatccaaatcctagattcatgtcacgtatggttagaacatggctagtaggataatttgtcttgtgatgtccatagccttggcatttgtggcacctaactttcaatagcttgtcttctgtctccttttctttctccttctttgaggaatcaacgtttttagagctatctaaaccactagcatcaatattaggtttaaaagtgctaaaagatttcgaatagttcttacttgcatacaatttctttttctagtttatgtagcgtcaccagggaacaaaaactcggccgttccgttctggaacggccgctttgtaacggatttcagagaggccgttccgttaaataccgttctagaacggtgatttggaattcacaccaaactcggcgcgatagcgttacgtaacggtgtaacggcgttccagaaccgttacaatcacataacgtccgttatttgaagaagaccagttcttttggtggaggaagaagaagagccaacgcaagatctatagatctgagttaaaatttgaaaataaaacatgtttttttatttaaattaaagcttacagaggatgtagaactcaaattcgagtaaacccctcctttaatttcattaggttactgcaaatcgaaccctaaattgcaaaccctaatttcgaaaaaaccctaatatgcattgggatgcaacgctgcttctccggtcatggcagagaaggtcgacgagtcatcttcggctgcttttagcactgtagctgccggtggttggcttgtttgcaggttagtgcttgctggttttctttctctcataccgatcatcttcttcttttctctcttctctttttcttttttattgtgtgactgccagtcacgtgataattgcaactcataaagtatctctttctctctcttcttttcatccctttttatttttctttcccttttagtttttattccctcacgtggaatcacctaattttcatccttttttatttttttagttacactcttacacagaagtatgttcaaatatcattatagtacctcaaatattgtatttataagagttttggacataatatgatatagaaagtaaaatagaagaaaaataaagtttaaatgtcacttgtgtgatttttttaaaaaaattcacgccgcgacggccgcgaaacgttctatttcccgttacaagccgttcccgcgataacgcgaccgttcccgcgaacgcgaccgcgaccgcgttttttttccttgagcgtcacatcttgcaagcttcttcaaaggtgagttatgtgtacaactccaatttctctccaatcccctccgtcctcatttaggcctccaaggaagctacttaaacattgatcttcaagttcatcaattttccaaagaatggataacttctcgaactcctttatgtaatcttcaacggacatattcccttgtttaagagtagaccattccatgtacaagctttgtttgtagttagaaggaacaaaacgtcctcttaacaactttttaagcttatcccaagtagagattttgggtttattagctttcacacgctgcctctttactccatccaaccaaatagatgcatatttggttaccttaagcacggccaccttgtatttcttttcttttggtgtctcttaatcccaagtagagcttttgcgtgtgaaagctaataaacacaaaatctctacttgggataatcttcttcttgtttccgaaacaactaattcttatggtagttaggaaagcaagaatggtttctaattcaatagggaatatattaattattattagtttaagttaaatagtgcacgaatctaaatagattattcgtctcaaaatctcacttaagtatagatttgtttggacatctgagggaagaagaagagagcgagataaaggagaattatcactcaatgaatccatatcccgagttttcccatttacttctttgaaagcaatatagttcacgaggtcttattatcagtctatggacataagagtaataatttaagggcaaaaactatgactttatgggtttaaactgatacatgttctgttaaactgatagatgttctgtgttaaaccgatactcatatattcctggttaaactgatagatatatgatttaaattgatacccgtctcagtcatgtcttggattgagacggtctgacacaagactttttgtgtattatatatctgattagaataaatttatcctgtttactaattattttatcttctccagacacttgttgacacaatatgcaatcagtttggtaaagatgaactcaaactacagtgcaaggtcctttcattgtcctacagtcataaggggatcccttcttcagaaaattgggtcgtgtcttctgtgtcaaaaaattccattgaagatcaacaatatgatgctgtcatcgttaccgtgagttttactttgcttactgctattgcaccaatctttcttcttttgacacactgataatggcaatgctgttgtggtttgaagccatgttatggggttttagggatatttatggagtctgatctaatatgttattggataaaattcagatctgtaacgtgactcaatgagattgaaaaaaattgaatcaagataatggattggaaaattaggagctaacctagggtctataagcgatccacttggagtctcataccaagcaggtattcgacattttaggtttatattgctgctatggctcatatgggagcctacatagggtctggtgcttattcctttttcttttgtctagttttggggctgcacatttctgttgtgttttgatatggatagccatcacctgcaattgcatggaggctgaactaagttctataggggagcaaacagtatctgttggaaatttattttcatattgtgtttttaaatgctataatccaaaatttgttgttcccctaaaatgcctaaaatacccttatgtaactgctccatctgtcccttaatagacttcccatttctccaatgcatgtttgccaatacacattttgtattgttaatatcaaaaattacatattagtaaaaattataaaagtttgattttcctaatgtacgcaatgagacgaatcaaacaagacgccatatgactatgttttttcttatacttcctatgttttttaataagtgacatgttttccttttagggaaatgtcacaataagtgacacatagctcaaagtagtaaaaatacttctcatttattacatctttgccattatttaattgtttcacctacctactttatccaatactcaaatttgattggttgaacaattggtcccaactttctctagactccttggtattccctttcccccactttctctctgtgtcacttattaaaaaatggaggacgtatattggaaaaaaattggaaggttttcttcacttatgaatagtggtaaaattagagatgggaaggctattttgggatggatggagtaatatttaaatttttaaaataatgtcattgttttagtgatgaaataaaattcaaggctattttttctagtaattatgttatctgtacatcaccacacgtatcgcgtgcatataagactagtttgatgatattccaacactgttcgaaggaagtcaggcatggaaccatgtttgcttccatatgggaaatattttgcttactctccttcaaacatctacctcattatcccagaatgattgatcgaatctaatacaaatatacaattgatcatatgccaccagggaattacatcaaattaaatttttatagaaggggaatcagtcatagcctcatagggaacgaataagtgatactcgccagtttctttcctggttacttttcctcttctcactagccatcctttatgtatgggtatgctgcatcattcctgccactggttgggactcccgtttgaactatggggggatgggaaagctaagccatcatcttcaaattgagtttcttgagaatgtaagacaccatctgtaagatgaatatagtgcactctatagtcaatgtcatgatctttatgggtttatctgctgaaataactgtgatatacccagctctccatttacaaagttttcctacatattaaactcttgcccgcaattctagaacttcattgtagaacttttcctacataagcatcatttgtcttttctgtagtaaaagttagaaagagctttattttagaacattcgtttttagttttctttgttgttgattactccgccacttttaatacttttatgattcaagtatttgacaaaatcatgtaatttaggtcctctgctgcatgcagtctataccctctctctctctctctctctctctctctctgtggttgtgtcttacttgttgagttactaactccagccattacataaagtaggctggcattatgatgagcaaattactcaagaccacatgttagctcctttttcttttctccttattctgaaaggcaaatataggtccatcttggtgcttctcatgtcataagtaagctgaccccctccttttccagggaataggacaataatccaaaagtgagggttttacatgttgggatttgtgaagtttcttattttacttaatagccgagtcagtgttacaatacatagtaccgtgttacaaaatagtatgtaacaccaagcatgtttatgtgcaaaattgtgcaagactttgttgctggcacgccaagggctgttttaatgtagtttacttattcttttaggtttttcagatgacaatcataaagggaattaggagtgtttttattgtagtcaatccctattgtgctacaacgataaaagaaaaaagcacaagactagaaggagaagtaatgtctaggaaagactcctcacctggggttgctagtcacctacacatcttagaaggcatcaaaccaaagcttattcccctcgactgttttcgggagaaaagaagacaaaattgtttctaacttatactttaccagtttcactacagcatcagaaagaagcaaaatatgctcccacaacacggcgaacctagctttccagatgtgataaaccagaccagcaaaatgattattttcactagagctttgagtctattttttcggtttttccccttcttcctggtaatgtcacgccaccaagccatcatctcaattttttgagatttgacgtaatcgctcaaatagctgagtaagacacttcttgctctaaatactaataaaaaagaggtgaatgtgggtctcagccatgttactcaaatcggataaagtgtctactcttattagggtttttgggtgttggactcatccatttttttttgtaaaatgtcaagattttggtttgaaatgagagattcaagtgtcgtgacatgagtcggcacgcaacacttaaacgtgtcgaagtaacagagggtctcagacaatcaactttaatcaatcacgaaccccaaaatttatgcaacctttgctcatattcagtctctgtaaagcactcaactgcagcacacccacccattcgcttcacctacagcaggagggcacccaagtaattgctatgatgagcgaattattctgttttgccttgctggaatattgctgttagatttgctgactcactggcagttaattatagtcagagaatgagaaatatcctgtagagagagaaagggtatcttttgtatttagctctataaatagctaaggaagggaagggcattgagagtttatgatattataataggagagatttagcctctcgaatgctgataggagcgtagctcttgttggattatcaatactactctgtttgctctatctatttctactcaggttccttcttgtacagtggatccctgattggatttacttcatcaaccagcagataaaattatttgtaggcacattgaaaccattccaaacctaatgaggccaaagtttatcacaaagaatataggagccaaatgtaggcaacagataagagtataattgccagaagttgaagactccaggtattgttcagaaaccttaatgcatatcatcattctgacactagattttccccggagccaactaacaaaaatgaattaaagagattaaggctatgtttagttcacctgaaattttctgatctgaacttatctgatctgatctgaacttattttttctgatctgatctgatctgatctgaaccaatctgattacaagatcttatcttttagatttttctcaatatataagaaaaaatatagtcatgtggggtcttgtttgattcgtctcaatgagtactttattaatattcaattattataatttttactaatatgtaatgaaagatataatgatttttaaatataagcatgatctgaactgatctgatgtgaacttattttttctgatctgatctgatctgattagatctgaaataagcaaaaataaggtgaactgaacatagcctaagcaacaattgagggaaaataagatcattatggctaagataagataaatatgtaatgataaaatcagagtaattatatcagttacactctcaacattcgtcagattgaggtttcctcccaaaatgccaacccacttttctgtattttcacgtccttctctctacccttctaggtatatattacatcagctgtaaaatttttgaaccaactagtagaatactgatctaccctcaactgcctcactttctcattttttctgggcctttttctctctagcacaagtccacataagtgatgcatagcagaaatataattccactagtcatcctcaatattgatataacaaacacatcacccacatattatcatttttaatcgctgcatgcgaggcatacttacccaccaatcaggatatgcataacagcgttcctaattccaaaaccaccatatatcttgggtttgcaactctcatccctagcaacaaggggactttctgaaaaagtggcagattccgcccacaagtagtttgtacggacacctttattatattattaatatcatatttcggcaacacaaattaccagcccagtaaaacatgaattgacatgagactaacaaggggcccaatctaatatcgtacgtctgtactaagcaatgtataaaaaaaagctcaaggtgcattgatgcaatagggatcctaatgtgcataggtgcgcctcattgaagtgaggcaccactaaggataaataaaaaagattgatgtaaaattaaattgtgcaccttgggtgcgcctcgatgaactttttttgtgtgcctaagtgtacctcaagtacgcctcattgatatcgcctcgcctggcagaaaacgagcttgaccccaatcgccttgctccccaccgcctaggcgtgcctcagtcacactttttaaatacattggtattaagtactcagaatggcaaaaagaaactttgggcattaattagacatttcactttttgtgcaactatttgtgacttcagagattgatatgttttctacattacagacttttgtgatggctgcatggtctccactgtcaaagaacattagtttaagtagaagaaatattgctctattaccttcctccctctacaaacaaaatcctaaaatgtggttatgtagtgccaattcaaacttgtagatgcatgactaatgctttcattatgctgtgggtttttatactatgattcatgtccaattacataacaattagctggagtcaggatatgtcacggaaattttaagcctggcaggatgattgtttatattttctctttttcggtgtttaagtcaaagtaaacttctaggctgctcttttataggctagttgggctgttggggagatctacacattaagtgtgaagaaatcttgtctaactccagtttggttgagaactgtaagctgtcataacatttgttgcatgatgaggccttgtgggattatcatgttagctgtaaactctaaacttacttgaaatctagtgttgtgtctccttatttctgtagtcaaaattgaaccttctgtacgtttttgatacctgcgactagaatgatggaattctgaattactgatactattacaaccatctgctaagaacgaagatgactcttagctaatttctcagcagatttagagaaattaagaagaattactaatgaatatttaaagagaaaactaccaagatatgattgtattgatgaaaaacaccaattacaacctaaccaacattcgagaggttggagctctcccaagtaaccatttctctcactaaacttatcaattttcaagatgccttttccattctcagttcctctatatttatactactccccttagcaaactacccaacttattccccaagtaaactaaagagataatatctaaaatacccttccccctacaataatattagttcttagcattaccggccccctaaacttccaccttgtcctcaaggtgggtcgtaatcatcactaaattctgggcctctactcgtatattcagtgtcttgcagcccttcaggccccaagcctaggttatgcagctcgtgttgcggctcctcctcatatagttctctggctggagtgagtgcctcaactataatgaaaaagtcctggaggtggggaaggaaggagtgtctgaaatggtgtggtgtgctgctggtgttatgggcttgtgcctgaaagttttgggtttaaagagatggagtggagaagagtggagaagtgactggagacgtaaaagaaggaatcataatttttgtaagtggtgggttgaaaaagttggtgggaagaattgtttttataaaatgtagtgtaatggtcgaaaaatgggtggagtaagtatggtttttggctggggatgtggtactgggttgaaaataaataggtctgagcttacttgtaaaattggcctcaacatgagcaggcccaatatcttgagccaattccccaaaagctggcaatagagcactcttaattgcattgttgtgggccatcgggctccaaacatatattcggaggagccggacttctttggtgatgtcattagcttggcccattgcacactttcccttaacagcctcaagatcttttcccacttttgtaccccaaccacgtggcttcaccatcctttctttcttgcttttgtcacttttttggcaatatacgagtttgtccttactaccctcatcttctaatgttggcttcctcaccaagcttaatttctggaattttgtccaccaaatcccaccacccatcgtcaacaccatacctatctacaccggccaagaagcctggtcctccacccgaattttcgccacagacaaagcctgaacaaccgtcagttctctcaccggagaagttcacaggtccaccacctgacccactagttgctgatccacccttcacaaatctccctcctctggctgccacaagtagtggttcctccgtaatactcatatttctcgtccaagagccctggaccaccaccggacccacttccaccggcaccaacttgttcaaatgatacttctctttcttttccaaacagcctacttggactggaaaaaccactgcgattgtagcctccgccagatctgtagcctagtgcacctaacgtgcttccaactgcaacccaatagggatggaaatggatgggattcggggagggtggagcatcacccgcatccgtcacccgcatccattcgctccacccgctccacccgcatccatccatccgtcacccacgggtgaaacgggtgggtcggtgataaacgggtggaaccatttagggggtgtttggtatcatgtttttttacaaaagaaacagaatcaagtaacaaaatccgtttctacttgtttggttctatgttgctcagactcgagtacccatgtccgacacgggtacgtgtccaagtgtccaactcagctattttctagaattttttatattttttaacccaaaacaaagtgtccaagtgtcccacccatgtccgactcccgaggatccgacacgggtacttgaggtgaaatgaagagtccgagcaacggaggtttggttagtgtgtaaagtaacaattaccgttacttgaggaaaacacatccccccaagttgtttccattcaaaaacctaaggaaacaaataacgtttcactcctcaaacaagaggaaagggaatgggttatatttatttccattccattaggataccaaacaactaataagggtaacacttattattatcctttcccctccttatcaaaatcctttccattccgtttacggtattcataccaaacacccccttagtatattttctaatgaaatttgtgatatgatatgcatgatataaaataattctatcaaaaatataaaaagtaagtaaacttacatgtacaacttaatagatgggtgatgggttggaggttaaacgagtgatggatcgggtgacgggtgaagaaattctcacccaccactcgctttccatccatttaaattaggtttttcatccatttaaaaaaccgggttaaacaggtgatgtatgatccatcacccatttccatcctcaaacacatcccgatttgtttactgcaccaccagatccaccagtataaccacccgaaaaatcatcatgccttctactagccttgtaacctgctcccggtgagaagcttcttccacaagtggtggtcgctggacctccatctccttcttccccaaaaaattttccatgacacccactcgacccttcatctgtgacaacctcttcttcgtccacctctgaagttttggggtcgtcttcctcctcaagctcctcttgaagtaactttaacttccgttggatgggagagaacgcttcattgattatcttcaccagatcttcttgaagtttctcgaaactttttctcacgttttcctctacctctttcgtgatttcctttccgatctccttcatttttagactaggagctcttgcgattccatggcagatttctttttttaaaacaagaaaatcaggcacttaatctcccagaatagtggtgctctgataccattttctaagaaccaagatgactcttagctaatttctcagcataacaacaaatttagagaaattaagaagaattactaatgaatatttaaagagaaaactactaagatatgattgtattgatgaaaaacaccgattacaacctaaccaagaggttggagctctcccaagtaaccatttctctcactaaacttatcaattttcaagatgccgtttactactccccttagcaaactacccaacttattccccaataaactaaagagataatatctaaaatacccttccccctacaatattagttcttagcaccatcaaactgggatggatggttttgtaaggttccaatttacttctccatcaaaatattttaggattttttatctcatgtattttagagtttcctcgtccctttttatctgataagattcttctgatgatttgattttatggtaggctccaatcagcaatattaaagaactgaagattctgaaagctggagttccattttcacttgacttcattccagaggtttgtatttttatagtggttagacatgcttcccctagttttcaaagtaaaagcatccttgttgtgacgatattttttcccttgtttttgtttttattattatcatcacttatttccattttctattttccatgctgataagatgttcatcaccataatcttgtggtatcagaagtgtttagtggagtttattcactacacatgcagttgttcttttgccatgaccgccattcattttctcgtcaaaacaaatctatgaagtttggttttcagactcatggttcttgtagctcttgtgaatttttttttcttctccttgcatgcattcttcaaattacatattgcatataccaggtgctctcctttattttatatttaatttttaaaattctatcatatattttttaatgtcaaacctcaaactaggggttcactgcatcttaggcttaccaggctaatatttctttacttaaccttttccctttatatttgctatcctcttgtgtagtaatcaccataagaagggtacaaactaaattaccctcccattcttttgtatcattctgaaatagtgtcacagagctttgatttttttgccctcatttaatctggcaaatgttctctctatttttttttttttactttcttttgacgggattctcaggcaattgttacggggagcagccagtcacactgtttctgtttattatgcaggtgagttacctgcccctctctgttatgattactgcgtttaagaagaccagcgttacaagacctcttgagggcttcggagttcttatcccttcgaatgagcaacataatggactgaagactctcggtaattgtctggttcacgtgtgtagcgaatcagattttcaaaccctgatttcgtaacattgcaggtactctgttttcatctatgatgtttccagatcgtgctttctccgatatgtatctctatactacctttgttggaggaagcagaaatagagaacttgcaaaagcttcaacgtatgagatatgcaatgttttaaatgtatgctatagtcatcgtttcaaccttttggtgcctttttcttactaatttatcctcctggtttaatgatcttagggatgaattggagcaaatagtttcgtctgatctccaccagctgttgggcactgagggaaaacctacttttgtgaagtattgatatctttcacccaacttaacatgatttgtgcttataatatgttaaataaagtaactgaaatcctgaaattaagactacgaaactgtatggtgacagtcatttttactggaacaatgcattccctttatatgggcacaattacgactcagttctgagagcaatagaaaagatggaaagagatcttcctggacttttttacgcaggtaatctgtcatttgcttgttgcgataaagttcatgtacagttggcatatcaatcaacttgcattctttcttgctaactccaaacaatcaggatcattaacttgtaggctgcagcaacagagagtatctcccaagttgttaggtttcatgtaacctcgtcgctgagatgaaatttccgttggctaaaaagtgaaagttttgtattgatgttacccaaaacaaaagtattttgcatgttgcttgaagttttggttgtttcagatagtacatcctttgacatgaaaataaatggaaaagcgtatgtcaagcaattatcatctagtttctttgtttctagatactagccgcatttgatcccagatcatttttgaggaagtcagctgaaataccgtagctatccttcagttttcataataaaactttaatggatctgatgtacagtaatttagtgtgcaccgggttaataattgatattaacttcatatagtgagtcttataaagatataatgaacttatatacaatatagtggattttattaatggaaaacatatagtgaaactatatgcaatatagtatgatacataaagacttagacaacaagagcattcgaaattacaaagaacaaaggaaagaacaattgtatcaaaccggttcgaatgaacaaacaaccaccacttccacaatcaatgtaccaccaatcaagactaaactataacaatgagcttctagtttaagtctactttgagttttaatcaccaattcaacgattagatgatcaaaattgcaaaggttaagagttggtcaaacctaaccaagagttacactaggcacatagctttgttaggagtatattagtttatgaattctagttaagttagaaatccaatacctagttggattaggattcctaattggattagaattatagtttagttagaattctagtaatagtaggcgtgtgattaggagatataattagcttaattcttatattgttagtttaattcttatcctcgttttaggtttatctttagtcgaacttgtaccctatataaggggcctttatttcattaataatatagtttattttgagtttaaacctttacttgtgattgtttgcttgagaggttattaatcgaaccattaataacttttcaggattgttaagtttttagtgttaaacatcttaatttcaggagtgattttaagagtgtttagattcttgtattcaagtttcaggactgatcttgaatcaagaaatatccctagtttcgactaatatcataagtagttcgaattcttggagtcttttcttcaagattcatattcataacttgattatttagacttcttggttttgtaatcatatcaagtggtatcagttttccagggaggagaggatacaaagggttctctttgatcaaagaagatccaagggcatcaataagaatgacacttgcaataagttcgagtgatacaaacaacttcaagactcgatcttttgctaccaagaaccaatcttgacgcctgaagattgttaggacaaaggataagaagtgtttctacatccaagattgcattctttacgtccaagattgcgtcaagatccattctttaagttcaagaaaggagtagaaagcattcgaacactacttaaacatgacatccgagatggataagctggctatggccatgagtgccttggcacaatcacaaactgagtcacgcaaccacatgggtaggatggaggcacgtgaccgtggattgaaactagatgactatagtggagatggcaatccagaagacttgttggagtggatttgccaactaggcaaagtgagtgattataggggctttgatcacaagaagagattcaaggttgcttccattaggctcacgaagtatgctggaatacggctcgaaggattgcatgcacaaacttcttgcctaatgactatgaacaaaaacagttcataaggctcgcatcaataagccaaaacacacttagtgtacacgaatacagcatggagtttgacaaattagggcttatatgtgacatagaagagaaagagcaatacaagattgcaatgtacattaaagggttgaatcgatatatagccaagaagatcgaagtctcaacttatcacttctttgaggatgtgactaaattggctaagaaattcgaagagcatgacaaagaagaagggcctaagagttcttacacacctaagtatgactctagtgctaaagggaaatcaacagttccctactcaaggtggtcggaaagacctaagaaccccactacacctaaggaggacactagcatggagaagacaaaagtggccgtacctaaggagagtttaattttgtgttttatacatctttgcttaagagcttaacaattgaaactattaataacttttcaggatggttaagtttttagtgttaaacatcttaatttcaggagtgattttaagagtatttagattcttgtattcaagtttcaggagtgatcttgaatcaagaaatatccccttgttcaactattataattgatcttattcgagttcttggagttaatttcttcaagattcatattcatacttgattattagacttcttggtttagtaatcatatcaatatcattagcattaatttacccccagggagattaagaaaggattagcctaatcaaggcgcttaagaagtttttaggaaaaatcgtgcttgttaagcttaagaattgaacttctttcaccatttgcccttgattctcttgttgaactagaagatcttggttcatagtagatgctcctgcatcatagtagagcatttaattttaattttttaacatgcacgaagatgtaggtagtgtagtatatatcgtgagacgtggtttaacatatagaaagatgtagtttctgcatgatatagtgagtttttgcatgatatagtgaatgtctgaatgatacagtggatcgttccgaattgttgtagtttgtatgatatagtatttttgtgaatgatatagtgagtttcttcatgatacaatgggtttctgaatgatatagtggattgcttagaaatgatatagtgagcttttgtatcatgtagtaggtttctatgtgatataggttgttaaaagatgatacatgcttttggcctcatgtactctaatgttaacgtgaacccggtccttgcaagtcaattgcagttttttcaatattaagctatttttttttttttttttttttttttttttttttttttgtacgggaatatttagcatctttaccacaaacataaccatacgaatattatgcggaaattccagtctgaagtcttaacttttcaaaattaaaagcttctatattatttttggaatgaaaaaaaatgagctatggcatgttattttgaaatacaatgagtctcaaggtgcatagtggcttcaattctacgaataatgaatggactactgatttctaattttttgttccgggcttttgcattaggtaaccataaagatggactctctgtgggaagaactatttcctctggatacaaagctgcggagcttgtgatatcctatctcaactctacttaagatgcctaaatgatcgaggagactccgtaagtcctttctctgattctatctttgaactgagtggaaacacgactgtggtctaaagtagttgatgtctcagatatccagaaatggcgttagtgatattcaggagctgtccattgaccctttgattcattgttgcagtttactgaaagttgttagctggtctcagaaaaacgaaaggaaaaaagggggaaaacaaaaacaaagaaacgtagattgtggtgttaaaatcaagaattccagagatttgtaccttctttatcagttgaattgtttacagtgtgaatcaagaagttagctcgaccttcttttcttgtgaatggtaagatttcgtgatcatcaatacttgattgtgctgtttgcaacttcaacggtaagatttcctgatcttacagtttaattgcttgtgctgtttgccactt

SEQ ID NO: 105 - DNA, 1572 bp, synthetic construct
  source 1..1572: mol_type = other DNA
atggtaatgctatacgattctcacctctcaggagtctcaactcatcttcaactatcgcaggcatttcccaggaagaacccattaatggccaaagtgtctgagccgggtaaacccacttctgctaaaaggattgctgttgttggtgctggtgttagtggacttgctgccgcatataagctaaagtcccatggcttgagtgtgacattgtttgaagctgatactagagctggaggaaaactcaaaactgttgcaaaggatggtttgatttgggatgagggggcaaatactatgatagagagtgaagcggaggtcacgagtttactcgatgatcttgggcttcgtgagaagcagcagtttccaattgcacaaaacaaaagatacattgcgagagacggtcgtcctgtgctgataccttcgagtcccattgcacttctcaagagcaatatcctttcagcgcaatctaagctacaacttatgttggagccattcctttggagaaaacgctatgcttctaagatttctgatgagcatgctcaggaaagtgtgggtgagttttttgagcgacattttgggaaagagtttgttgattatctaattgatcccttcgtggcgggtacaagtggagatcctcagtctctttctatgcgtcatgcatttccagaagtatggaatattgagaacaagtttggctcactaatttccggattaattcaatctaaactgtctccaaagaaggaaaagggtggaggaggaaagccttcttctaatgaaaagacacgcatacgtggttcgttttctttccagggtggaatgcagacacttgttgacacaatatgcaatcagtttggtaaagatgaactcaaactacagtgcaaggtcctttcattgtcctacagtcataaggggatcccttcttcagaaaattgggtcgtgtcttctgtgtcaaaaaattccattgaagatcaacaatatgatgctgtcatcgttaccgctccaatcagcaatattaaagaactgaagattctgaaagctggagttccattttcacttgacttcattccagaggtgagttacctgcccctctctgttatgattactgcgtttaagaagaccagcgttacaagacctcttgagggcttcggagttcttatcccttcgaatgagcaacataatggactgaagactctcggtactctgttttcatctatgatgtttccagatcgtgctttctccgatatgtatctctatactacctttgttggaggaagcagaaatagagaacttgcaaaagcttcaacggatgaattggagcaaatagtttcgtctgatctccaccagctgttgggcactgagggaaaacctacttttgtgaatcatttttactggaacaatgcattccctttatatgggcacaattacgactcagttctgagagcaatagaaaagatggaaagagatcttcctggacttttttacgcaggtaaccataaagatggactctctgtgggaagaactatttcctctggatacaaagctgcggagcttgtgatatcctatctcaactctacttaa

SEQ ID NO: 106 - DNA, 37009 bp, synthetic construct
  source 1..37009: mol_type = other DNA
tattccatcgaatgtagcaaattgactgtccgttgcaatttcggagtttccactcgtcgcatggtaaatggtaatgctatacgattctcacctctcaggagtctcaactcatcttcaactatcgcaggcatttcccaggaagaacccattaatggccaaagtgtctgagccgggtaaacccagtaagtcaaacattcgaatcacaactcaagcaaatttgtcttgtttgcgttatattttgctcatttcagccttttttgtttttccgacctttgcatactgaatattgtgtgtgtgtgtgtgtggggtttcagcttctgctaaaaggattgctgttgttggtgctggtgttaggtaaattttcgtctcttgcagagtttttgagtcatttgggaattctatgtgaaacttgtaactcccttcagtccaacgaacgcagtacaattttctatcaaatcatggtcctaatttccaattttccatatatattgttggaattatattgggattgtctatcactattaatagtattaggatcaattgtagagaagcacagaaatttttgggatcgaaagaatatctggattgccacattaacagcagatataattcttccaattggtttttggttcttcctaccttgacttgtctggtcaaacattataaactttaacctttaatatccattaaagtaaactataggatttttttgtctaaaacatgcttatataacatgaaatttgtgagaaaccaccttatatatatttttttgcgaaaacaaaccttaaacaaaattattatcgtgagaacaaaccttatgccaatttcgatcattgacccaaggttttggcattgaccgtgtcatgaattttgttgggtttaaaaagtcatgtgtcttgcatacgaaatggtaaatgcgggaaccttgggtcaatgtttggaatccgcataaggtttgttctcccaaaaaatgtttttgttcaaggtttgtttttgcaaaaaaacttatataaggtgctttctcagaaatttcatgttttataaagtagtatttgacaaaaaaccctaaaatatattatagaattattattgactaaattgtgtaaaaatgtactcttctaaaagtacattatagtattttagtggaacatttgcgagaaactactttataaatacgatttttgcgagaaatttcctaataaaaaaatgtgaagtgcaaaactatcttattgataattttctactccctcaaatccaaaatactatgaagtctttcctttctggtttgtcccagattagtttgtacgcttccatctttggtatgatcccacttttattatacttattagttttacgtgagttccttactctatctcttttaacaaaaatactcaactatctctatccaataaaaagttccttactagtcctatcacatctgctttttaataaaataacgtttgataaccacacaacttatatccttaaaatacacgttcaaccaagtgttgagattaatttggacggagggaataaatattttttgaggcatattggtagcagtattcggattccgataggttgactatgtttccaatgttgaccaacacttgccttgcatgtaattctaactttgctcttttttattcttcatttccctcgtattccatatacaatgtttagagacccattccttcctcttctcttctttcccttccttactatgctttgccataatcttcctcaaatgagtgcaaattaatttgtcgttgatgtaggccaactgattgtagcacatcttcatagttcatacctcaacacactcgtaattatattataccctacatgttaaatggctcatgaagctttattttatatcatacttcctccgtttcacaataagtgtaacacttttcttatttggaataatcacaataagtgaaaccaagctccaaatggtaagaaaagttcactcttattacaaatataccaccaaaaagtaagaggggatcacaacttcaatacttcttcactctactttattgtggtcccaactttctctctctaaattccttggtaactccccactttctctatgtttcacttatggtgaaatggaggaagtattttgtagtggtatttagctactaggccttggatgatatacaatcatacaatgtatttatattcacgataatttgctgcccaccttgattaccatgatttccaccaattttatcaatttcagtacttcaccaccccgaatttatattttttatttccaaccttggtatctccatttgtctgagtgcccgatccatttgtatcgcctccagaattgaagaagcttcctgcagctagacaattaggaaggttaaaaaagtttggagatggtggaggatagccataataatcattgttgggaggtggaacttggaaggttattgtagggttgaagtccttgatgaagaagaattgagttcaaatgagaggaaaaaggagcagggaagagggacaataagaaaaaaaagggtaaactaaaatcacgtgtaaggcatgtgcagatcaacatcagaaagcatagtcaacctactggtattagggcactgatacctttttgggtcaaaatttttttacaaggtatttcatgaggtagttttgtccatttttttttttacaaggtatcgtctcattttttttttatcatttagtttctcgcaataagtgtatttcatgaggtagttttttccaaaatttcctcatttattataaaatacctcatcttttccataaataatgcaatgtctagacttttacgctgtttacacatgctcctttgaccatctattgacacacaaggaaaaatagagtagagtcatgcaggatcttgttagatttttctcgatatatactttcaaaagatcaatttttttataattttttttttgaggggattttttttttataattatgtacttatcaaaggtcaaagttgtgcaccgggaagcataaaactctatgtgttgcaatttacatggaaggggaggagtataataagagaaaattatggtaaaaggttcattcctggagatcatgagaaaggaagtagaaagaacaaaaaagaacaatgggagtgcttttcaatgtttgttgtacgtagcatttattcatttgctataatgttttgtgacattgtagtggacttgctgccgcatataagctaaagtcccatggcttgagtgtgacattgtttgaagctgatactagagctggaggaaaactcaaaactgttgcaaaggatggtttgatttgggatgagggggcaaatactatggtaatgtttttgattattgcaggtcttgcactttagcgcacaattaatttctggatttttttttgtactgtggtggttatggtcatcaacatgtctcacccactgtgcttgcagatagagagtgaagcggaggtcacgagtttactcgatgatcttgggcttcgtgagaagcagcagtttgtaagtctttcattatctgaatggcacatactttatttcgaaagattgtaattgccttttctttctagatggcttcatcttcatgttgctttctgattcagtttcgtggctaactttccaagtttgtctgattgctaactctgtcatagccaattgcacaaaacaaaagatacattgcgagagacggtcgtcctgtgctggtaagtttgcttgttttacttttgacctcttttaagatctttcaactctggagcctggaaacatggtgatgcaggaggcaagttctctctattttacatcctttcttctctgtatcttatgacatttgcctcttattctgtgcagataccttcgagtcccattgcacttctcaagagcaatatcctttcagcgcaatctaaggtcgttttatgttaagacatacttgatgctgagagtttattgaattcttaaccttcttcttattttttttttatttttttagcaaaaggtaagtatattgcatttaccaaaaaacagtatgtacaccaccacagcagccatgtcagaatctagaaataccaccgaaaaaatcctacacccaaccagagacagttatattatatcctactcctaagtttctgtacccaatttacatcaatattggtccatttacaagatatttttataattcacagaagcacatcagttttaattagtttaataatgacctctggatgaataaccaactcagaccatatagccttattcctggctttccggaagttgtacgccagagcagcaagcacagcaatgcaaacctgtttcttatacctccttttatgtgtcttagcccatctcttatagctagtgaagatacagtcgtgtgcacaggattgaaccccaatccaactagcgaaagcctcacaacattatgactataaatacatctgaagtataaatgctgcacctttttctcctcttgcctgcacggtatcagaacaaatcccagctttagctaacaattccctggttttcagtttattcaatgccatcatgcaagcaatgaaagaatgttttggaacattcagtttgttccaaacacagtgagagcaagggacctttcctgcagttccacttagccacttatatccctgactaatagtatgactctttgcaccgtaaattgatttcaacttaactttttcataagcagtgaattgtgtgttgttagagtgtctagctgtctaggagattgggagaaaaggagggaccaaggagatagaaacacacctttgtgtttctttgtgtatttactttttagggtgggtcacgttttctgagaaatttgggaaaaggaagaaatagtaacacactttcccatttgtataacctgtatactggagctccaatataatttgcatttttttttgagctgcaagaatatgttgacaaacagttattgcttcttcctcagctacaacttatgttggagccattcctttggagaaaacgctatgcttctaagatttctgatgagcatgctcaggaaaggtaatgtcaagacatgtgttacctcgccttaattttcgttccaggaggtgagcatgcatttagaactaaaaggcacaaagactgttggtggtcttgcctgttcaaatataatggagaggagttttcgctacatttaccctctcttgaagtggggttgaaatatagcatcaagttgaatgcttgattaagtttaaaggacttgtgtaactctttttctgtttactgtgattacatgacctggttgattaacataatggtctgtttatctgtagtgtgggtgagttttttgagcgacattttgggaaagaggtaatggtttaccatagtatttctgctttagtggtaaattgtaatgttgctgataattatacttcgctgcagtttgttgattatctaattgatccttttgtcgcgggtacaagtggaggagatcctcagtctctttctgtaagtgaacattttgtgcttcactcccaattttttggaggctggaaatagattcttttccagttgttctgtcaaaaatagatgtagctttattttgaatttgaagttcccaattgttcattttgactattactgattattgctaagagtggcattatgctattatgctcctaaaagaaaggtgaattttgacctacatatagtataatgtatcaatattggtttaattgtttgttcttttgttccttttggtgctcatcttgcgccttgttctcatcgctcgttttttcatgttgcacttgatttaaatttgctcagcttaacttgtctttttgaatttatattacttattgctatattttactaatttcgttgaaactaattttttgctgaacttttcgttttgttgaaatcatttttctgaattaacttgattttcctgaatagaattgaattttggtgatcttaccttttctgcagccttttatttctttcttgtcctttttccaatctcatttttttatatttccattgtgttgacatcttatcattaactgtgcagatgcgtcatgcatttccagaagtatggaatattgagaacaagtatggaccataagacgtttattttaatcgacatgtatgtttcttagtttatacatatattaattctgtggtaaaaaaaccgaacaagaatatctttttttttttctatcatcaaaaagggtgaatatatgtagaggaaaaagatttgaatcaagatattagcctaaagcaataataatgttagtaatagctttaataacaaattcaaaacgtacattaatgaaccgagaggccggaaaatagttaaagtgaccactaagagaagcgaaggattcatgatgggttttcaacccagtagggcaaatttgttcaatgttctttacaaatcaagcttattaccttgtgggtgtttttgctagagatgaatgatagaattttccctagttggaagtcttttttggttactttatgggagctagtgatgtaatttgtttcgccttatggcatttcctaacatgtgcttttgtgatgtattgaagctttttttttgccttaatttatgctggattttaattttgttctttgtttcatttttcttgcttttgaaaaaaatatatagatatgtatatattaggattggtcgaggattttgagggaagggaaagacctaagaaaacttggatgagggtgattgatagtgatatgagtctatttgggatcgaagaaaatattcctttggataaggtgtagtggagggttgagggagcaaatttatgcagattagcttgacttaaagtttttctttttgattatttttcatttacttgtgttttgcaaacatttactcatgaatgatgtaaacttcttcaaccaaatctctggaaaaaaataatctacatggaaaaaacattattaatgttaacttgacagagatcccatccttgtgaagcagctagcaattaggcatctaacaattgacattttaatggacaggatagaatgtctcttgatagtcaataccctctgtttcattgtatcccatagctactaatctagtttgtatctttccaaagaaccattattttgaagtttcaccttgaacacccattttgaaccaatatgtttcttgcccttggggagaggggctaattgccatgttttgatgcggatgcaaagacacttgttctacctgagcctattgacttgatcatggatactctagggtttgaactcaagggaaagaatcaagtcttggcatgtgtggtgacatggcgtggggatggagtaaagaagagtcatagttctgttaggatatgttcttgcttgctacatagaatcgtagttctgttaggattgctatgatattatatctagtagatagattttatagttaattaggataaacatgtgatgatcatgttataataggcatgtgattagaggataggattagcttaattcttatcttgttgttagtttaattcttatcctagttttatgtttatcttagtcgaagttgtagccatataaagggcgttccattcattaataatacttagttttgctttgtgttttaaacatacttcttgattattgtttgcttgtgagctaactaatcaaaccattaaagacttttcaggagttttagtgctaaacatcttaatttcaggagtgattttaagagcgtttagtgatcttgaatcaagaaatatccttgttcttgttcgactaatatcagtggttttgttcgagttcttggagttaatctcttcaagattcttattcaacttgattgttgagcttattggtttagtaatcatatcaagtggtatcagttttccagggaggagaggatagataggattctctttgatcaacaaagatccaagggctatcaacaaggttcaaacattgctgcttgttcaagacttgatctttttctaccaagatgcattctttacgtcacaaggtagtaataacaagattaagagtggtttttacatccaagaatcaatctttcacgtccaagatttcatctttcacgtctaagattcattctttaagatcaagaaagttataacaagcatagaagaacacataaccatggagtccgagatggacaagcttgccaaagctatgcaagcacttgcaaagtcgcaaactgaatcacagagtcgactcaatgagaatactaccacaatcaatgggattggtagtaacatgaataggttggaggcacgcatggatgccattgcaaccatcatacaaaagaagcttgatcggaatagtgccaacttcataggtgccaattcagaggaagagttggcagaacgtgaagaaagatcatccaagactacatacaatgatgatcgtggcttaaagttggatgactataatggagatagcaatcgagaagacttgttacagtggattcgacaacttgagaaggtatgtgattatagaggctttgatgacaagaaaagattcaggattgcctccataagactcacgaaatatgctggaatttggcttgaaagcttcaaggcacaacgagccaagaaaggtaaagaaaagttgtgtagttggacaaagttgaaagttcaagcttaaagagaagttcttgcctagtgactatgaacaaaaatagttcataagactctctactataagccaagacacgcttagtgtacatgagtacaccatggaatttgacaagctagggcttatatttgacatagaggagaaagaacaatggaagattgcaagatacatcaaaggcttgaaccgccacattgccaagaaggtggaagtatccacttatcacacctttgaggatgtgacaaagttggctaagaagtttgaagaacatgagaaggaagagaagcctaagagttcttacacgcctaagtatgatactaatgctaaggccaaggctagcttcctactcaaagtggtatgaaggacctaagaggctaagaacctcaccccacctaaagaagacacaagagttgagaagcctaaagtcgtcgttccaaaggagaaatttgaagagatgagaaagtgcttcaagtgtcaaggaaggagacacatagcaagcaattgtcctaacaaaagagtcctcaccatgagacaatacctagctttgcaagaagaggaggatgtctattagttcgtccctgatgaagagcaaacttaggggaagaagaggaggaggatgcttttgctgaggatgatgcaaggctagtaggggtcaagaggcgcaccttacatgtcgaccatacacctagcatggagcaaatggaaaaatcttttccacactagatgcaaggtaggtgactatatatgtaatggtataatagatagtggttcttgcactaatgttattgtatctgaggtagtgtcaaagctaaacttagctacaagggcacaccctaagccatacaagttgagtttgctagatgatagcactggcatgagagtaaagaaacaagctttgatttcattctctataggggttataaggatgagttatggggtgatgtattgcctatgagtgcatgtcatctcttgcttggaagaccattgcagtttgataaaaaggtcatccatgagggggactctaatgtgtactctgtgttggttggttctaagagggtatgtttgcatcccttagctcctcattcagtggcgccaaagcaaccacctaagacaccaagttactttctatcttcaagggagttcgaacaagaggtggaggaagaaggttgtgcttatgccttgattgtaagacatgctgccacaagtgtcaagactactagcaatgagaagctcgaagccttgatgaaagagtttgaggatgtctttctagaggaactacgacccttgagaggcatagaacatgctgtagaccttgtacctggcgcccctttgcctaacaagcctgcttataagtgtgatccagtggcatctagggaattgcaacgccaaattgaggacctaattgaaaagggctatttaagggagatcatgagtccatgtgttgtgccagctttactagttcctaagaaagatgacacatggaggatgtgcatagatagtagagcagtgaacaacattacagtcaagtaaaggtttcctatgcctagattggaagatatgttggataagttacatggggcatcaatcttttctaagattgatcttcgaagtggctaccaccaaatgaggatcagagaaggtgatgagtggaaaacaacattcaagaccaagcagggattgtatgagtggatggtgatgccatttgccttatgcaatgcgccaagctctttcatgagcttgatgaatgaggtacttcgtccgttccttaacaagtttgtggttgtttacatagatgatatacatatctatagccaaaatgtggaggaacacttgttgaacttgcgtagcttattcatgaagcttagagagcaccaactctatggtaagattgatggcgacgaggttgacgggggattatggcggcagtgaatcaccctctttgccggtcactgaaatacaacctgaggtatctttaaattctgtaattggattgactaacccaaaaactatgaaattgctgggaaaaattgctggatgtgaagttgtggtgatgattgaccctggggcaacccataattttttatcactagctactgttgagaaattagctattcctgtgtcggaatcggaaggatttggggtttctctaggggatggacaggcggtgaggggtagtggaatttgtagaggggtgttattgagtttaaatggtggagttgaagtggaaacagattttcagcctctgggtcttggtaattcggacgtgattttgggtgtacagtggctggagacgttggggacagtggagagcaattggaaaacacaaacaatggggtttgaaatcgagggtgtcaagttcactttgaaggtgacccatcactggcgaggtctcgaatctcactcaaagccatgatacgtaccttatgtaaagagggtggaggtttgtggcttgagttgaaccagattgagcattatcaggagaaaacaccgcattcatcagccttacctgaaattccagttttcttacagagagtccttacccaatttcagtctgtgtttgctacaccagaaggcttaccaccgataagagaacatgaacatgcaatagttcttagagaagggtgtaatccggtaggggtaataccgtaccgttatccacagttccaaaaagatgagatagagcgcctcatcaaagaaatgttggcttccggaatcatcaatccttccacgagccctttctcgagcccggtgatattagtgaagaagaaagatgggtcgtggcggttttgtgtagactatcgggccctcaataaagaaacggtccccgataagtatcccattcccgtgattgatgaattgttggatgagcttcatggggcaacacttttttcaaaactcgacttaagggccgggtatcaccagatccgggttaaggccgaagacactctcaaaacagcttttcgcactcatgaggggcattacgagtttttagtaatgccatttgggttgacaaacgcgccggcaacgtttcaatcccttatgaacgaggtcttcaaaccattcttgcgcaagtttgtcttggtatttttcgacgatatattggtctacagtagttctgccaggaacatgaggagcatttgaccttggtgttgcacaccctagcagctcataaattgtttgtgaatcagaagaaatgtgattttggcaggtcggaagtagcatatatggggcatatcatctctggtcaaggggtggctgtggatatggagaaggttcaagcgatggtggaatggccccttcctaaaaacctccgggaattacggggatttttgggccttacagggtactaccgcaaattcgtacttcactatgctcatatagccaagcctttaactgatcaactcaagagagatgcgtttgggtggtctgaggcagcaactcaagcctttgaaaagctcaagaaggcgatgatcacatcccctgttttggcaatgccggacttccaagagttgtttgtggttgagaccgacgcatccgggtatggtctgggggcagtgttaatgcaaaacaaccgacccattgccttttacagtaagttgttaggtgcccgggctcaattaaagtcgatctacgaaatggagttgatggccatctgcatggcagttcagaattggagatattatctgctgggtcgacatttcctcattcgtacagaccaacagagtttacgtcatctcactcagcagcgagaagtaagtactgccttccaacgttggatgagtaaacttatggggttcgattttgaaatacagtttaagccggggtgtgccaaccgggtagctgatgcattatcccgcaagacagtgggagaggttgaattgggtgcgctgatattaactcatggggtggactggaccgacttggagcgtgaaattgaaggcgatcctctgttgtgcaaaattaaacaagacttccacgggggtgctattactcctgtgcacttttctttggtggacaacaagctgttgttcaagggtcgatacgtgattcccagctcttcggtttttattcctaccttgctgcgagaatatcacgattctcccattggagggcattcgggggacctcaaaacatatctcaggatggctgccgactggtattggaggggcatgcgcaaggatgtggcgcggtatgtgcaacattgtagcgtgtgtcaacaacaaaaaatgtctcaacagatgccagggggggtactacaaccactccccataccttcctcggtttgggatgacttgtcaatggacttcgtggaaggcttgccatcttccaagggggtaaacaccatcctcgtggtggtcgatcgtttgtctaagtacgcccacttcctcccactacgtcatccatttactgctgtgtcggtggcaaatgtgtttgtcaaagaggtggttcgtttgcatgggtttccttcctccattgtttcagatcgggatcgaatttttatgagtgtgttttggcgggaattatttcgtttacatgacaccacactcaaacgaagtaccgcgtatcatcctcaaacggatggtcagtccgaaatcgtcaatcgagctctggagacttatttgcgttgctttgtgggggaatacccgcgctcttgggctcagtggcttgggccgaattttcatataatacttctcctcatctctctaccaaaatgaccccgtcaaggtcctttatggtagagaccctcctactgtgatacgggttaatcggggagcctcacctgttgaaagcttggaaaacatgctccaagagcgagacgcagtattagatgccttgcagattaatctgattaaagctcaacagaaaatgaagagtagtgctgatgctacaagaagagaggtgcattttaaggtgggagatcgagtgtacttaaaattacagccttaccgtcagaaatctttggcttaacgcccttatgagaagttagccgcccgtttctacggaccatttactattttacagaagattgggcaagctgcatacaagttacaacttcctgtttctagcaaggtgcatccggtgtttcatgtctcccaactgaaacaggccgttggttccattcccgtttcagccactattccagagcaattgtcttctgacttggagttagaggtggaacctgatgaactcctcgatgttcgtagtgtttctagaggccagcacacttacttggaagctctcattcagtggcagggattaccatcattcgaagctacctgggaagatgtggctgctttccatcaccattttccatccttccaccttgaggacaaggtgaaactttgggggggtggtaatgtgatgcaccaaactaccactccactactcacctattagaggcgtaagaaaaagggggtaaatcaggaatagtttacaaattctgttgaaaggaatattttgtaattatgatgtcagaggttgttagcaaaaaggcagtagagtaacaataaaaaggggaagggaggagagaagaaggtattgagatttttgtaaggaacttggcccttgggagagttgggagcctctcgaaagctcaccattatcttgtgaatattttccttcctggttatatacaagaaccttcctctgtcaatttcttttctctctaatcttatttcttattctgttttctggttgccattgtttgaagttgcttgttgtgcttgagtaaatacgtgaagtggtgaaacccatctgaattcatcacatctattccaagtggtataatacaagcttgtaatccaaatctaatgagaaatctaagttatgaagaatttcaaaagaactaagtacccttgttttggatgcccaaggatttacttgccgctcaagttaatgctcaacgtgcaagatacaacctctttagtatcccaaggtagtttccataagaattaattgagctcaaatcaagaacaatatttttatgtattaatgtgaacacttcctgaattatattagatatatggtctgaaggttggaagaaagattagcttttaattttaagtttgagatagtttttagaatcgaggaaagattagctcttaacttgtaaactaaggattgctttataagtaaaacattagttatggaactcttaaaattggttttgaacatttctagttaaaaatcccatgtaattctcccaaactagcttaaaatctcacatttcacaagctaaggagagacaaatggcgttctcttgtgaaacaatctaaaattttcattaggctactgttttcaagtatttatatgttagaagtgccgcatataggtacataaaataagtttacaaacacaagtaggaataaggaaaactaaaagagaaacttcagccatacaaaaccggctgaaatcagctactactttctactttctagcttcaaaatctgattgcaagtctcctttaagccaatcaccaatgaaaacctttcctccacatgaagtgtgctcaaatcaagagaagaaacccatcattcgcctatagctacctgggtcagatgaagatacggcaaaaaaaacgctggaaatcagtgaaccaaaataagcaccaattggatgctttctgtccttgctacattttcttctcataggactacttcaagccatacatgaataagcagttagatccagctcctagcatccatttgatcgtacaaatgagctccaaaaagataagtaaaaccaagcagccaaaacctaattaatactaatgatgaattagttgaatagctaatgacgatgaagcaacactttagtaggaatagtgttaattatgatcaatgctacttaatcttctgattaatttttggaaaaatgtcatatctaccttctgtatacacttattcataactatatcgtattattattatttttaaataactaccttttaagtaccaaaacctaagaaatcaggcacttgatggattccatccaaagatccatttggcggggcccactaactgacttttgattttttgcctttcctcttttggttaatctcaatggttcatcaataacaactcaatcttctccccatttcatcaaatcatccctaaatcagaactttttcaaattcacccaaatgaggttatggaaacctctaccaagtttattcgaccacttttagtctagctcaaagttttacacttgcttcaaaaactaagatttattaactttagaaattaggtttttatttttattttttatttaactttgtaacaatcttaaataactcaggtgctttctagagtttggctttaattgtttttcccttggttatgtgaaagaagtatgactactttctccaagactaaagtagagagcaaaaaatgcaattctggaatttcttgcaaaagaaaaggaacgagttaatgataatgaaaaacaaagaaaatgatgagaagagaggagctgaatcaatcatgatcatgtattttaaagttttttttgctattgaagtgacttaagaagaggaaagaggatgagtgaagacaaacaaaagaaaggataaatagagggaaatcttgggcttagaaaggtgaaaaggtaagaagatgagttagtgggccccaacaaatgtatctttggatataatccgtcatgccactgtttggggcttgcttaagtccatacattacttcactaattttacaaaatttattttcttgaccaagaactgaaaaaaccttcagtggtgatctattaggttttggaagttaaaaggtagttatttaaatgtttttaatataaaaggtagttatttagatatttttaatataaaaggtagttatgtgaataaaagtgtatataaaatgtaattttttgacatttttgccttagtttttcttgctaattcaccttttcaacttgaccaagttgctatgaggagaaaacgagcaattattaagcaaatcgcaacactagcattaatccatggcccatgaaactctccataattagagattggattagcacttagtagaacttcttgctcctgctccaggtttccattacttctttatctaagtgcatcaaaaggttgttgggttatgaaaggtggtggttgtgtatagtcattgtcaaaatgttgttaatgcactctatttagaggatgagggattgaatagttttcacctcgtgacctttcattcctttttaaaaaaattgataatgtgtattggtcctatgactgtatgaatggtaataagctatctcatgagctgttactatcttcctcagagtctaggtagaagggtttgggctgataattttctactatgtgcaattagtttgttggatttggatatgctagttgatataggtcctttcccttgggccttctcttaatataggcctacagtgtgattgaagataaatcttctggagaatataagaacaatgagatggattggttagaggttgatttgttcttttggtgtaagactatttcgggttctctattggttatgttcagacgccagaatatgtgttggtgattgttttccatgaacatactttatccgcagagacatttttcttttttcttcctataagattatatttgtttcctctcttggtgctcatctcagtgtctctactttacgttaaactgttgacattacttgacaatgcgtatatttgtcgcatggtgctcttccctcactccacgtcgaccccatacatcaaaaaatgccattaaagaatattcgaactcacaaccttgtgttgaaagaatggaatccctaccaatgactcattaattcattttctctttaagaaataaatgatttcctcacaaacttttaggctttaagagcccaaaagataaaaacataaaataagatagacatcaacgtcaagattagccttaaatgcacaaagcacatgtcaaatgattgataactactcacgagttgcaactctttgggcgttgcctaatattaattggatctcttttaaaaattgttggtggttatggttggtggagaggaccatgtaacttttagctggtcacaactggtaatgattgtcacttttactgcccataaaaaaatttaaactgttgaatatgtttctggcagtggatctgacaaatcctttacaagttggcgtccattttgttttgccatgtgactcaattataatacgtgagttttattatccaccaggtttggctcactaatttccggattaattcaatctaaactgtctccaaagaaggaaaagggtggaggaggaaagccttcttctaatgaaaagacacgcatacgtggttcgttttctttccagggtggaatgcaggtattagcatgtagctttcattctgttaacatttgtggttcttccagacatacatccaatgctttttttttttcttgctataaccataaacattcttgtcatgaacattctttaatactgttgctgagcttagtgtattcgttcattcatgtaatttcctctcttgaggttaaaatggcatacagccttacaacctatatccataatgctccttagagtagaatccctaggttataacatagtaccacttatcaaaataaacatggcacacactgcaggacaagaagtaaatccacctagagaactgagcacctagtagtaaaagcagcgatacattactaataacagtagcagggccataagagtagtaaatgggcctcatttcaacactccccccgtaatggtgagagagaagaagcagtctgaactcccagcttggagagcaaaatagagtgttgctgaacagggagaaccttagtgaaaacatctggcacttgatcttgagatggaacataggtaggctgaataaccccttcttcatttgtattgtccctcaggaaatgacaatctatgtctacatgcttggttttctcatgatgaactagatatgctgctatggcaagagcagcttggttatcacagtagataggagtagcactggactttttaatgcgaagatctttgaggagttgtttgatccacatcacctcacacacagcaagagccatggatctgtactctgcactgaccacaagaaattgcctctttgactttcaagatacggggggagtcaccaaggagcacacaaaaccagatgtagaatttacaacacccatcccattcactatcacaaaatgctgttagttgagcactagacttgttcgccatgagaattcaccctgttggcagcttgaagatgcacattagtggggcagtgcataaatttgcttaaatcatgtatagtgaaggcaatatcaggcattgccttgtaatagtgagataaatgagcttccccatcaatttttgatacacatcaggttgttgaagaggatcaccattgtcagcatagagcttgacatgtgagtccatacgaagcctcaatcgtctgcaatttataaaaccatattcatcaacaagacccatcacatacttctttagagataaaaacgatacttcactacactgatccacttcaatcctcaaaaaatatcttaggccacccatatctttcatgtgaaattggccagcgaagaaactctttgcttcctcaatagttgctaaactattgccagcaagaatgaggtcgtccacatacaccaatatagcactgaaacagtgagagttttgcttgaagaatagagagtagtcacacttggattaagtgaatacattttgctttaaagcagtgttagcttggcaaaccattgcctcaaagcctacttcaagccataaagtgacttaagcagcttgcacaccttagttcatttggtgtcacttctgccatcagtacttagctccccctctccttgaactttgatcctgttacatgtttcactatatcctggtgatagcttcatgtatacactatcctacaattcaccatgcaaaaaagcatttttaacatccatttgtttgcaagaaccaaccctctaaggatgcaacaacaagcatgtggtcatctttgctacaggggtaaaagtctgctcataatctattccatatctctgtctgtcacccatgattacaagccttggcttatgcctattatttgtgccatcagtgctgtattttgttctgatccatccatgtgagggatggctcatttctacaaaatcctagttccgttaggatttgtgttgttttcctaattctagtaggaataggactcctaaaatcctaatcctcctagttctgttaggagtttaaaagttttagtttgattgtaattctagttgtgttagaaatccaaatcctagattcatgtcacgtatggttagaacatggctagtaggataatttgtcttgtgatgtccatagccttggcatttgtggcacctaactttcaatagcttgtcttctgtctccttttctttctccttctttgaggaatcaacgtttttagagctatctaaaccactagcatcaatattaggtttaaaagtgctaaaagatttcgaatagttcttacttgcatacaatttctttttctagtttatgtagcgtcaccagggaacaaaaactcggccgttccgttctggaacggccgctttgtaacggatttcagagaggccgttccgttaaataccgttctagaacggtgatttggaattcacaccaaactcggcgcgatagcgttacgtaacggtgtaacggcgttccagaaccgttacaatcacataacgtccgttatttgaagaagaccagttcttttggtggaggaagaagaagagccaacgcaagatctatagatctgagttaaaatttgaaaataaaacatgtttttttatttaaattaaagcttacagaggatgtagaactcaaattcgagtaaacccctcctttaatttcattaggttactgcaaatcgaaccctaaattgcaaaccctaatttcgaaaaaaccctaatatgcattgggatgcaacgctgcttctccggtcatggcagagaaggtcgacgagtcatcttcggctgcttttagcactgtagctgccggtggttggcttgtttgcaggttagtgcttgctggttttctttctctcataccgatcatcttcttcttttctctcttctctttttcttttttattgtgtgactgccagtcacgtgataattgcaactcataaagtatctctttctctctcttcttttcatccctttttatttttctttcccttttagtttttattccctcacgtggaatcacctaattttcatccttttttatttttttagttacactcttacacagaagtatgttcaaatatcattatagtacctcaaatattgtatttataagagttttggacataatatgatatagaaagtaaaatagaagaaaaataaagtttaaatgtcacttgtgtgatttttttaaaaaaattcacgccgcgacggccgcgaaacgttctatttcccgttacaagccgttcccgcgataacgcgaccgttcccgcgaacgcgaccgcgaccgcgttttttttccttgagcgtcacatcttgcaagcttcttcaaaggtgagttatgtgtacaactccaatttctctccaatcccctccgtcctcatttaggcctccaaggaagctacttaaacattgatcttcaagttcatcaattttccaaagaatggataacttctcgaactcctttatgtaatcttcaacggacatattcccttgtttaagagtagaccattccatgtacaagctttgtttgtagttagaaggaacaaaacgtcctcttaacaactttttaagcttatcccaagtagagattttgggtttattagctttcacacgctgcctctttactccatccaaccaaatagatgcatatttggttaccttaagcacggccaccttgtatttcttttcttttggtgtctcttaatcccaagtagagcttttgcgtgtgaaagctaataaacacaaaatctctacttgggataatcttcttcttgtttccgaaacaactaattcttatggtagttaggaaagcaagaatggtttctaattcaatagggaatatattaattattattagtttaagttaaatagtgcacgaatctaaatagattattcgtctcaaaatctcacttaagtatagatttgtttggacatctgagggaagaagaagagagcgagataaaggagaattatcactcaatgaatccatatcccgagttttcccatttacttctttgaaagcaatatagttcacgaggtcttattatcagtctatggacataagagtaataatttaagggcaaaaactatgactttatgggtttaaactgatacatgttctgttaaactgatagatgttctgtgttaaaccgatactcatatattcctggttaaactgatagatatatgatttaaattgatacccgtctcagtcatgtcttggattgagacggtctgacacaagactttttgtgtattatatatctgattagaataaatttatcctgtttactaattattttatcttctccagacacttgttgacacaatatgcaatcagtttggtaaagatgaactcaaactacagtgcaaggtcctttcattgtcctacagtcataaggggatcccttcttcagaaaattgggtcgtgtcttctgtgtcaaaaaattccattgaagatcaacaatatgatgctgtcatcgttaccgtgagttttactttgcttactgctattgcaccaatctttcttcttttgacacactgataatggcaatgctgttgtggtttgaagccatgttatggggttttagggatatttatggagtctgatctaatatgttattggataaaattcagatctgtaacgtgactcaatgagattgaaaaaaattgaatcaagataatggattggaaaattaggagctaacctagggtctataagcgatccacttggagtctcataccaagcaggtattcgacattttaggtttatattgctgctatggctcatatgggagcctacatagggtctggtgcttattcctttttcttttgtctagttttggggctgcacatttctgttgtgttttgatatggatagccatcacctgcaattgcatggaggctgaactaagttctataggggagcaaacagtatctgttggaaatttattttcatattgtgtttttaaatgctataatccaaaatttgttgttcccctaaaatgcctaaaatacccttatgtaactgctccatctgtcccttaatagacttcccatttctccaatgcatgtttgccaatacacattttgtattgttaatatcaaaaattacatattagtaaaaattataaaagtttgattttcctaatgtacgcaatgagacgaatcaaacaagacgccatatgactatgttttttcttatacttcctatgttttttaataagtgacatgttttccttttagggaaatgtcacaataagtgacacatagctcaaagtagtaaaaatacttctcatttattacatctttgccattatttaattgtttcacctacctactttatccaatactcaaatttgattggttgaacaattggtcccaactttctctagactccttggtattccctttcccccactttctctctgtgtcacttattaaaaaatggaggacgtatattggaaaaaaattggaaggttttcttcacttatgaatagtggtaaaattagagatgggaaggctattttgggatggatggagtaatatttaaatttttaaaataatgtcattgttttagtgatgaaataaaattcaaggctattttttctagtaattatgttatctgtacatcaccacacgtatcgcgtgcatataagactagtttgatgatattccaacactgttcgaaggaagtcaggcatggaaccatgtttgcttccatatgggaaatattttgcttactctccttcaaacatctacctcattatcccagaatgattgatcgaatctaatacaaatatacaattgatcatatgccaccagggaattacatcaaattaaatttttatagaaggggaatcagtcatagcctcatagggaacgaataagtgatactcgccagtttctttcctggttacttttcctcttctcactagccatcctttatgtatgggtatgctgcatcattcctgccactggttgggactcccgtttgaactatggggggatgggaaagctaagccatcatcttcaaattgagtttcttgagaatgtaagacaccatctgtaagatgaatatagtgcactctatagtcaatgtcatgatctttatgggtttatctgctgaaataactgtgatatacccagctctccatttacaaagttttcctacatattaaactcttgcccgcaattctagaacttcattgtagaacttttcctacataagcatcatttgtcttttctgtagtaaaagttagaaagagctttattttagaacattcgtttttagttttctttgttgttgattactccgccacttttaatacttttatgattcaagtatttgacaaaatcatgtaatttaggtcctctgctgcatgcagtctataccctctctctctctctctctctctctctctctgtggttgtgtcttacttgttgagttactaactccagccattacataaagtaggctggcattatgatgagcaaattactcaagaccacatgttagctcctttttcttttctccttattctgaaaggcaaatataggtccatcttggtgcttctcatgtcataagtaagctgaccccctccttttccagggaataggacaataatccaaaagtgagggttttacatgttgggatttgtgaagtttcttattttacttaatagccgagtcagtgttacaatacatagtaccgtgttacaaaatagtatgtaacaccaagcatgtttatgtgcaaaattgtgcaagactttgttgctggcacgccaagggctgttttaatgtagtttacttattcttttaggtttttcagatgacaatcataaagggaattaggagtgtttttattgtagtcaatccctattgtgctacaacgataaaagaaaaaagcacaagactagaaggagaagtaatgtctaggaaagactcctcacctggggttgctagtcacctacacatcttagaaggcatcaaaccaaagcttattcccctcgactgttttcgggagaaaagaagacaaaattgtttctaacttatactttaccagtttcactacagcatcagaaagaagcaaaatatgctcccacaacacggcgaacctagctttccagatgtgataaaccagaccagcaaaatgattattttcactagagctttgagtctattttttcggtttttccccttcttcctggtaatgtcacgccaccaagccatcatctcaattttttgagatttgacgtaatcgctcaaatagctgagtaagacacttcttgctctaaatactaataaaaaagaggtgaatgtgggtctcagccatgttactcaaatcggataaagtgtctactcttattagggtttttgggtgttggactcatccatttttttttgtaaaatgtcaagattttggtttgaaatgagagattcaagtgtcgtgacatgagtcggcacgcaacacttaaacgtgtcgaagtaacagagggtctcagacaatcaactttaatcaatcacgaaccccaaaatttatgcaacctttgctcatattcagtctctgtaaagcactcaactgcagcacacccacccattcgcttcacctacagcaggagggcacccaagtaattgctatgatgagcgaattattctgttttgccttgctggaatattgctgttagatttgctgactcactggcagttaattatagtcagagaatgagaaatatcctgtagagagagaaagggtatcttttgtatttagctctataaatagctaaggaagggaagggcattgagagtttatgatattataataggagagatttagcctctcgaatgctgataggagcgtagctcttgttggattatcaatactactctgtttgctctatctatttctactcaggttccttcttgtacagtggatccctgattggatttacttcatcaaccagcagataaaattatttgtaggcacattgaaaccattccaaacctaatgaggccaaagtttatcacaaagaatataggagccaaatgtaggcaacagataagagtataattgccagaagttgaagactccaggtattgttcagaaaccttaatgcatatcatcattctgacactagattttccccggagccaactaacaaaaatgaattaaagagattaaggctatgtttagttcacctgaaattttctgatctgaacttatctgatctgatctgaacttattttttctgatctgatctgatctgatctgaaccaatctgattacaagatcttatcttttagatttttctcaatatataagaaaaaatatagtcatgtggggtcttgtttgattcgtctcaatgagtactttattaatattcaattattataatttttactaatatgtaatgaaagatataatgatttttaaatataagcatgatctgaactgatctgatgtgaacttattttttctgatctgatctgatctgattagatctgaaataagcaaaaataaggtgaactgaacatagcctaagcaacaattgagggaaaataagatcattatggctaagataagataaatatgtaatgataaaatcagagtaattatatcagttacactctcaacattcgtcagattgaggtttcctcccaaaatgccaacccacttttctgtattttcacgtccttctctctacccttctaggtatatattacatcagctgtaaaatttttgaaccaactagtagaatactgatctaccctcaactgcctcactttctcattttttctgggcctttttctctctagcacaagtccacataagtgatgcatagcagaaatataattccactagtcatcctcaatattgatataacaaacacatcacccacatattatcatttttaatcgctgcatgcgaggcatacttacccaccaatcaggatatgcataacagcgttcctaattccaaaaccaccatatatcttgggtttgcaactctcatccctagcaacaaggggactttctgaaaaagtggcagattccgcccacaagtagtttgtacggacacctttattatattattaatatcatatttcggcaacacaaattaccagcccagtaaaacatgaattgacatgagactaacaaggggcccaatctaatatcgtacgtctgtactaagcaatgtataaaaaaaagctcaaggtgcattgatgcaatagggatcctaatgtgcataggtgcgcctcattgaagtgaggcaccactaaggataaataaaaaagattgatgtaaaattaaattgtgcaccttgggtgcgcctcgatgaactttttttgtgtgcctaagtgtacctcaagtacgcctcattgatatcgcctcgcctggcagaaaacgagcttgaccccaatcgccttgctccccaccgcctaggcgtgcctcagtcacactttttaaatacattggtattaagtactcagaatggcaaaaagaaactttgggcattaattagacatttcactttttgtgcaactatttgtgacttcagagattgatatgttttctacattacagacttttgtgatggctgcatggtctccactgtcaaagaacattagtttaagtagaagaaatattgctctattaccttcctccctctacaaacaaaatcctaaaatgtggttatgtagtgccaattcaaacttgtagatgcatgactaatgctttcattatgctgtgggtttttatactatgattcatgtccaattacataacaattagctggagtcaggatatgtcacggaaattttaagcctggcaggatgattgtttatattttctctttttcggtgtttaagtcaaagtaaacttctaggctgctcttttataggctagttgggctgttggggagatctacacattaagtgtgaagaaatcttgtctaactccagtttggttgagaactgtaagctgtcataacatttgttgcatgatgaggccttgtgggattatcatgttagctgtaaactctaaacttacttgaaatctagtgttgtgtctccttatttctgtagtcaaaattgaaccttctgtacgtttttgatacctgcgactagaatgatggaattctgaattactgatactattacaaccatctgctaagaacgaagatgactcttagctaatttctcagcagatttagagaaattaagaagaattactaatgaatatttaaagagaaaactaccaagatatgattgtattgatgaaaaacaccaattacaacctaaccaacattcgagaggttggagctctcccaagtaaccatttctctcactaaacttatcaattttcaagatgccttttccattctcagttcctctatatttatactactccccttagcaaactacccaacttattccccaagtaaactaaagagataatatctaaaatacccttccccctacaataatattagttcttagcattaccggccccctaaacttccaccttgtcctcaaggtgggtcgtaatcatcactaaattctgggcctctactcgtatattcagtgtcttgcagcccttcaggccccaagcctaggttatgcagctcgtgttgcggctcctcctcatatagttctctggctggagtgagtgcctcaactataatgaaaaagtcctggaggtggggaaggaaggagtgtctgaaatggtgtggtgtgctgctggtgttatgggcttgtgcctgaaagttttgggtttaaagagatggagtggagaagagtggagaagtgactggagacgtaaaagaaggaatcataatttttgtaagtggtgggttgaaaaagttggtgggaagaattgtttttataaaatgtagtgtaatggtcgaaaaatgggtggagtaagtatggtttttggctggggatgtggtactgggttgaaaataaataggtctgagcttacttgtaaaattggcctcaacatgagcaggcccaatatcttgagccaattccccaaaagctggcaatagagcactcttaattgcattgttgtgggccatcgggctccaaacatatattcggaggagccggacttctttggtgatgtcattagcttggcccattgcacactttcccttaacagcctcaagatcttttcccacttttgtaccccaaccacgtggcttcaccatcctttctttcttgcttttgtcacttttttggcaatatacgagtttgtccttactaccctcatcttctaatgttggcttcctcaccaagcttaatttctggaattttgtccaccaaatcccaccacccatcgtcaacaccatacctatctacaccggccaagaagcctggtcctccacccgaattttcgccacagacaaagcctgaacaaccgtcagttctctcaccggagaagttcacaggtccaccacctgacccactagttgctgatccacccttcacaaatctccctcctctggctgccacaagtagtggttcctccgtaatactcatatttctcgtccaagagccctggaccaccaccggacccacttccaccggcaccaacttgttcaaatgatacttctctttcttttccaaacagcctacttggactggaaaaaccactgcgattgtagcctccgccagatctgtagcctagtgcacctaacgtgcttccaactgcaacccaatagggatggaaatggatgggattcggggagggtggagcatcacccgcatccgtcacccgcatccattcgctccacccgctccacccgcatccatccatccgtcacccacgggtgaaacgggtgggtcggtgataaacgggtggaaccatttagggggtgtttggtatcatgtttttttacaaaagaaacagaatcaagtaacaaaatccgtttctacttgtttggttctatgttgctcagactcgagtacccatgtccgacacgggtacgtgtccaagtgtccaactcagctattttctagaattttttatattttttaacccaaaacaaagtgtccaagtgtcccacccatgtccgactcccgaggatccgacacgggtacttgaggtgaaatgaagagtccgagcaacggaggtttggttagtgtgtaaagtaacaattaccgttacttgaggaaaacacatccccccaagttgtttccattcaaaaacctaaggaaacaaataacgtttcactcctcaaacaagaggaaagggaatgggttatatttatttccattccattaggataccaaacaactaataagggtaacacttattattatcctttcccctccttatcaaaatcctttccattccgtttacggtattcataccaaacacccccttagtatattttctaatgaaatttgtgatatgatatgcatgatataaaataattctatcaaaaatataaaaagtaagtaaacttacatgtacaacttaatagatgggtgatgggttggaggttaaacgagtgatggatcgggtgacgggtgaagaaattctcacccaccactcgctttccatccatttaaattaggtttttcatccatttaaaaaaccgggttaaacaggtgatgtatgatccatcacccatttccatcctcaaacacatcccgatttgtttactgcaccaccagatccaccagtataaccacccgaaaaatcatcatgccttctactagccttgtaacctgctcccggtgagaagcttcttccacaagtggtggtcgctggacctccatctccttcttccccaaaaaattttccatgacacccactcgacccttcatctgtgacaacctcttcttcgtccacctctgaagttttggggtcgtcttcctcctcaagctcctcttgaagtaactttaacttccgttggatgggagagaacgcttcattgattatcttcaccagatcttcttgaagtttctcgaaactttttctcacgttttcctctacctctttcgtgatttcctttccgatctccttcatttttagactaggagctcttgcgattccatggcagatttctttttttaaaacaagaaaatcaggcacttaatctcccagaatagtggtgctctgataccattttctaagaaccaagatgactcttagctaatttctcagcataacaacaaatttagagaaattaagaagaattactaatgaatatttaaagagaaaactactaagatatgattgtattgatgaaaaacaccgattacaacctaaccaagaggttggagctctcccaagtaaccatttctctcactaaacttatcaattttcaagatgccgtttactactccccttagcaaactacccaacttattccccaataaactaaagagataatatctaaaatacccttccccctacaatattagttcttagcaccatcaaactgggatggatggttttgtaaggttccaatttacttctccatcaaaatattttaggattttttatctcatgtattttagagtttcctcgtccctttttatctgataagattcttctgatgatttgattttatggtaggctccaatcagcaatattaaagaactgaagattctgaaagctggagttccattttcacttgacttcattccagaggtttgtatttttatagtggttagacatgcttcccctagttttcaaagtaaaagcatccttgttgtgacgatattttttcccttgtttttgtttttattattatcatcacttatttccattttctattttccatgctgataagatgttcatcaccataatcttgtggtatcagaagtgtttagtggagtttattcactacacatgcagttgttcttttgccatgaccgccattcattttctcgtcaaaacaaatctatgaagtttggttttcagactcatggttcttgtagctcttgtgaatttttttttcttctccttgcatgcattcttcaaattacatattgcatataccaggtgctctcctttattttatatttaatttttaaaattctatcatatattttttaatgtcaaacctcaaactaggggttcactgcatcttaggcttaccaggctaatatttctttacttaaccttttccctttatatttgctatcctcttgtgtagtaatcaccataagaagggtacaaactaaattaccctcccattcttttgtatcattctgaaatagtgtcacagagctttgatttttttgccctcatttaatctggcaaatgttctctctatttttttttttttactttcttttgacgggattctcaggcaattgttacggggagcagccagtcacactgtttctgtttattatgcaggtgagttacctgcccctctctgttatgattactgcgtttaagaagaccagcgttacaagacctcttgagggcttcggagttcttatcccttcgaatgagcaacataatggactgaagactctcggtaattgtctggttcacgtgtgtagcgaatcagattctcaatccttgatttcgtaacattgcagctactctgttttcatctatgatgtttccagatcgtgctttctccgatatgtatctctatactacctttgttggaggaagcagaaatagagaacttgcaaaagcttcaacgtatgagatatgcaatgttttaaatgtatgctatagtcatcgtttcaaccttttggtgcctttttcttactaatttatcctcctggtttaatgatcttagggatgaattggagcaaatagtttcgtctgatctccaccagctgttgggcactgagggaaaacctacttttgtgaagtattgatatctttcacccaacttaacatgatttgtgcttataatatgttaaataaagtaactgaaatcctgaaattaagactacgaaactgtatggtgacagtcatttttactggaacaatgcattccctttatatgggcacaattacgactcagttctgagagcaatagaaaagatggaaagagatcttcctggacttttttacgcaggtaatctgtcatttgcttgttgcgataaagttcatgtacagttggcatatcaatcaacttgcattctttcttgctaactccaaacaatcaggatcattaacttgtaggctgcagcaacagagagtatctcccaagttgttaggtttcatgtaacctcgtcgctgagatgaaatttccgttggctaaaaagtgaaagttttgtattgatgttacccaaaacaaaagtattttgcatgttgcttgaagttttggttgtttcagatagtacatcctttgacatgaaaataaatggaaaagcgtatgtcaagcaattatcatctagtttctttgtttctagatactagccgcatttgatcccagatcatttttgaggaagtcagctgaaataccgtagctatccttcagttttcataataaaactttaatggatctgatgtacagtaatttagtgtgcaccgggttaataattgatattaacttcatatagtgagtcttataaagatataatgaacttatatacaatatagtggattttattaatggaaaacatatagtgaaactatatgcaatatagtatgatacataaagacttagacaacaagagcattcgaaattacaaagaacaaaggaaagaacaattgtatcaaaccggttcgaatgaacaaacaaccaccacttccacaatcaatgtaccaccaatcaagactaaactataacaatgagcttctagtttaagtctactttgagttttaatcaccaattcaacgattagatgatcaaaattgcaaaggttaagagttggtcaaacctaaccaagagttacactaggcacatagctttgttaggagtatattagtttatgaattctagttaagttagaaatccaatacctagttggattaggattcctaattggattagaattatagtttagttagaattctagtaatagtaggcgtgtgattaggagatataattagcttaattcttatattgttagtttaattcttatcctcgttttaggtttatctttagtcgaacttgtaccctatataaggggcctttatttcattaataatatagtttattttgagtttaaacctttacttgtgattgtttgcttgagaggttattaatcgaaccattaataacttttcaggattgttaagtttttagtgttaaacatcttaatttcaggagtgattttaagagtgtttagattcttgtattcaagtttcaggactgatcttgaatcaagaaatatccctagtttcgactaatatcataagtagttcgaattcttggagtcttttcttcaagattcatattcataacttgattatttagacttcttggttttgtaatcatatcaagtggtatcagttttccagggaggagaggatacaaagggttctctttgatcaaagaagatccaagggcatcaataagaatgacacttgcaataagttcgagtgatacaaacaacttcaagactcgatcttttgctaccaagaaccaatcttgacgcctgaagattgttaggacaaaggataagaagtgtttctacatccaagattgcattctttacgtccaagattgcgtcaagatccattctttaagttcaagaaaggagtagaaagcattcgaacactacttaaacatgacatccgagatggataagctggctatggccatgagtgccttggcacaatcacaaactgagtcacgcaaccacatgggtaggatggaggcacgtgaccgtggattgaaactagatgactatagtggagatggcaatccagaagacttgttggagtggatttgccaactaggcaaagtgagtgattataggggctttgatcacaagaagagattcaaggttgcttccattaggctcacgaagtatgctggaatacggctcgaaggattgcatgcacaaacttcttgcctaatgactatgaacaaaaacagttcataaggctcgcatcaataagccaaaacacacttagtgtacacgaatacagcatggagtttgacaaattagggcttatatgtgacatagaagagaaagagcaatacaagattgcaatgtacattaaagggttgaatcgatatatagccaagaagatcgaagtctcaacttatcacttctttgaggatgtgactaaattggctaagaaattcgaagagcatgacaaagaagaagggcctaagagttcttacacacctaagtatgactctagtgctaaagggaaatcaacagttccctactcaaggtggtcggaaagacctaagaaccccactacacctaaggaggacactagcatggagaagacaaaagtggccgtacctaaggagagtttaattttgtgttttatacatctttgcttaagagcttaacaattgaaactattaataacttttcaggatggttaagtttttagtgttaaacatcttaatttcaggagtgattttaagagtatttagattcttgtattcaagtttcaggagtgatcttgaatcaagaaatatccccttgttcaactattataattgatcttattcgagttcttggagttaatttcttcaagattcatattcatacttgattattagacttcttggtttagtaatcatatcaatatcattagcattaatttacccccagggagattaagaaaggattagcctaatcaaggcgcttaagaagtttttaggaaaaatcgtgcttgttaagcttaagaattgaacttctttcaccatttgcccttgattctcttgttgaactagaagatcttggttcatagtagatgctcctgcatcatagtagagcatttaattttaattttttaacatgcacgaagatgtaggtagtgtagtatatatcgtgagacgtggtttaacatatagaaagatgtagtttctgcatgatatagtgagtttttgcatgatatagtgaatgtctgaatgatacagtggatcgttccgaattgttgtagtttgtatgatatagtatttttgtgaatgatatagtgagtttcttcatgatacaatgggtttctgaatgatatagtggattgcttagaaatgatatagtgagcttttgtatcatgtagtaggtttctatgtgatataggttgttaaaagatgatacatgcttttggcctcatgtactctaatgttaacgtgaacccggtccttgcaagtcaattgcagttttttcaatattaagctatttttttttttttttttttttttttttttttttttttgtacgggaatatttagcatctttaccacaaacataaccatacgaatattatgcggaaattccagtctgaagtcttaacttttcaaaattaaaagcttctatattatttttggaatgaaaaaaaatgagctatggcatgttattttgaaatacaatgagtctcaaggtgcatagtggcttcaattctacgaataatgaatggactactgatttctaattttttgttccgggcttttgcattaggtaaccataaagatggactctctgtgggaagaactatttcctctggatacaaagctgcggagcttgtgatatcctatctcaactctacttaagatgcctaaatgatcgaggagactccgtaagtcctttctctgattctatctttgaactgagtggaaacacgactgtggtctaaagtagttgatgtctcagatatccagaaatggcgttagtgatattcaggagctgtccattgaccctttgattcattgttgcagtttactgaaagttgttagctggtctcagaaaaacgaaaggaaaaaagggggaaaacaaaaacaaagaaacgtagattgtggtgttaaaatcaagaattccagagatttgtaccttctttatcagttgaattgtttacagtgtgaatcaagaagttagctcgaccttcttttcttgtgaatggtaagatttcgtgatcatcaatacttgattgtgctgtttgcaacttcaacggtaagatttcctgatcttacagtttaattgcttgtgctgtttgccactt

SEQ ID NO: 107 - DNA, 37009 bp, synthetic construct
  source 1..37009: mol_type = other DNA
tattccatcgaatgtagcaaattgactgtccgttgcaatttcggagtttccactcgtcgcatggtaaatggtaatgctatacgattctcacctctcaggagtctcaactcatcttcaactatcgcaggcatttcccaggaagaacccattaatggccaaagtgtctgagccgggtaaacccagtaagtcaaacattcgaatcacaactcaagcaaatttgtcttgtttgcgttatattttgctcatttcagccttttttgtttttccgacctttgcatactgaatattgtgtgtgtgtgtgtgtggggtttcagcttctgctaaaaggattgctgttgttggtgctggtgttaggtaaattttcgtctcttgcagagtttttgagtcatttgggaattctatgtgaaacttgtaactcccttcagtccaacgaacgcagtacaattttctatcaaatcatggtcctaatttccaattttccatatatattgttggaattatattgggattgtctatcactattaatagtattaggatcaattgtagagaagcacagaaatttttgggatcgaaagaatatctggattgccacattaacagcagatataattcttccaattggtttttggttcttcctaccttgacttgtctggtcaaacattataaactttaacctttaatatccattaaagtaaactataggatttttttgtctaaaacatgcttatataacatgaaatttgtgagaaaccaccttatatatatttttttgcgaaaacaaaccttaaacaaaattattatcgtgagaacaaaccttatgccaatttcgatcattgacccaaggttttggcattgaccgtgtcatgaattttgttgggtttaaaaagtcatgtgtcttgcatacgaaatggtaaatgcgggaaccttgggtcaatgtttggaatccgcataaggtttgttctcccaaaaaatgtttttgttcaaggtttgtttttgcaaaaaaacttatataaggtgctttctcagaaatttcatgttttataaagtagtatttgacaaaaaaccctaaaatatattatagaattattattgactaaattgtgtaaaaatgtactcttctaaaagtacattatagtattttagtggaacatttgcgagaaactactttataaatacgatttttgcgagaaatttcctaataaaaaaatgtgaagtgcaaaactatcttattgataattttctactccctcaaatccaaaatactatgaagtctttcctttctggtttgtcccagattagtttgtacgcttccatctttggtatgatcccacttttattatacttattagttttacgtgagttccttactctatctcttttaacaaaaatactcaactatctctatccaataaaaagttccttactagtcctatcacatctgctttttaataaaataacgtttgataaccacacaacttatatccttaaaatacacgttcaaccaagtgttgagattaatttggacggagggaataaatattttttgaggcatattggtagcagtattcggattccgataggttgactatgtttccaatgttgaccaacacttgccttgcatgtaattctaactttgctcttttttattcttcatttccctcgtattccatatacaatgtttagagacccattccttcctcttctcttctttcccttccttactatgctttgccataatcttcctcaaatgagtgcaaattaatttgtcgttgatgtaggccaactgattgtagcacatcttcatagttcatacctcaacacactcgtaattatattataccctacatgttaaatggctcatgaagctttattttatatcatacttcctccgtttcacaataagtgtaacacttttcttatttggaataatcacaataagtgaaaccaagctccaaatggtaagaaaagttcactcttattacaaatataccaccaaaaagtaagaggggatcacaacttcaatacttcttcactctactttattgtggtcccaactttctctctctaaattccttggtaactccccactttctctatgtttcacttatggtgaaatggaggaagtattttgtagtggtatttagctactaggccttggatgatatacaatcatacaatgtatttatattcacgataatttgctgcccaccttgattaccatgatttccaccaattttatcaatttcagtacttcaccaccccgaatttatattttttatttccaaccttggtatctccatttgtctgagtgcccgatccatttgtatcgcctccagaattgaagaagcttcctgcagctagacaattaggaaggttaaaaaagtttggagatggtggaggatagccataataatcattgttgggaggtggaacttggaaggttattgtagggttgaagtccttgatgaagaagaattgagttcaaatgagaggaaaaaggagcagggaagagggacaataagaaaaaaaagggtaaactaaaatcacgtgtaaggcatgtgcagatcaacatcagaaagcatagtcaacctactggtattagggcactgatacctttttgggtcaaaatttttttacaaggtatttcatgaggtagttttgtccatttttttttttacaaggtatcgtctcattttttttttatcatttagtttctcgcaataagtgtatttcatgaggtagttttttccaaaatttcctcatttattataaaatacctcatcttttccataaataatgcaatgtctagacttttacgctgtttacacatgctcctttgaccatctattgacacacaaggaaaaatagagtagagtcatgcaggatcttgttagatttttctcgatatatactttcaaaagatcaatttttttataattttttttttgaggggattttttttttataattatgtacttatcaaaggtcaaagttgtgcaccgggaagcataaaactctatgtgttgcaatttacatggaaggggaggagtataataagagaaaattatggtaaaaggttcattcctggagatcatgagaaaggaagtagaaagaacaaaaaagaacaatgggagtgcttttcaatgtttgttgtacgtagcatttattcatttgctataatgttttgtgacattgtagtggacttgctgccgcatataagctaaagtcccatggcttgagtgtgacattgtttgaagctgatactagagctggaggaaaactcaaaactgttgcaaaggatggtttgatttgggatgagggggcaaatactatggtaatgtttttgattattgcaggtcttgcactttagcgcacaattaatttctggatttttttttgtactgtggtggttatggtcatcaacatgtctcacccactgtgcttgcagatagagagtgaagcggaggtcacgagtttactcgatgatcttgggcttcgtgagaagcagcagtttgtaagtctttcattatctgaatggcacatactttatttcgaaagattgtaattgccttttctttctagatggcttcatcttcatgttgctttctgattcagtttcgtggctaactttccaagtttgtctgattgctaactctgtcatagccaattgcacaaaacaaaagatacattgcgagagacggtcgtcctgtgctggtaagtttgcttgttttacttttgacctcttttaagatctttcaactctggagcctggaaacatggtgatgcaggaggcaagttctctctattttacatcctttcttctctgtatcttatgacatttgcctcttattctgtgcagataccttcgagtcccattgcacttctcaagagcaatatcctttcagcgcaatctaaggtcgttttatgttaagacatacttgatgctgagagtttattgaattcttaaccttcttcttattttttttttatttttttagcaaaaggtaagtatattgcatttaccaaaaaacagtatgtacaccaccacagcagccatgtcagaatctagaaataccaccgaaaaaatcctacacccaaccagagacagttatattatatcctactcctaagtttctgtacccaatttacatcaatattggtccatttacaagatatttttataattcacagaagcacatcagttttaattagtttaataatgacctctggatgaataaccaactcagaccatatagccttattcctggctttccggaagttgtacgccagagcagcaagcacagcaatgcaaacctgtttcttatacctccttttatgtgtcttagcccatctcttatagctagtgaagatacagtcgtgtgcacaggattgaaccccaatccaactagcgaaagcctcacaacattatgactataaatacatctgaagtataaatgctgcacctttttctcctcttgcctgcacggtatcagaacaaatcccagctttagctaacaattccctggttttcagtttattcaatgccatcatgcaagcaatgaaagaatgttttggaacattcagtttgttccaaacacagtgagagcaagggacctttcctgcagttccacttagccacttatatccctgactaatagtatgactctttgcaccgtaaattgatttcaacttaactttttcataagcagtgaattgtgtgttgttagagtgtctagctgtctaggagattgggagaaaaggagggaccaaggagatagaaacacacctttgtgtttctttgtgtatttactttttagggtgggtcacgttttctgagaaatttgggaaaaggaagaaatagtaacacactttcccatttgtataacctgtatactggagctccaatataatttgcatttttttttgagctgcaagaatatgttgacaaacagttattgcttcttcctcagctacaacttatgttggagccattcctttggagaaaacgctatgcttctaagatttctgatgagcatgctcaggaaaggtaatgtcaagacatgtgttacctcgccttaattttcgttccaggaggtgagcatgcatttagaactaaaaggcacaaagactgttggtggtcttgcctgttcaaatataatggagaggagttttcgctacatttaccctctcttgaagtggggttgaaatatagcatcaagttgaatgcttgattaagtttaaaggacttgtgtaactctttttctgtttactgtgattacatgacctggttgattaacataatggtctgtttatctgtagtgtgggtgagttttttgagcgacattttgggaaagaggtaatggtttaccatagtatttctgctttagtggtaaattgtaatgttgctgataattatacttcgctgcagtttgttgattatctaattgatccttttgtcgcgggtacaagtggaggagatcctcagtctctttctgtaagtgaacattttgtgcttcactcccaattttttggaggctggaaatagattcttttccagttgttctgtcaaaaatagatgtagctttattttgaatttgaagttcccaattgttcattttgactattactgattattgctaagagtggcattatgctattatgctcctaaaagaaaggtgaattttgacctacatatagtataatgtatcaatattggtttaattgtttgttcttttgttccttttggtgctcatcttgcgccttgttctcatcgctcgttttttcatgttgcacttgatttaaatttgctcagcttaacttgtctttttgaatttatattacttattgctatattttactaatttcgttgaaactaattttttgctgaacttttcgttttgttgaaatcatttttctgaattaacttgattttcctgaatagaattgaattttggtgatcttaccttttctgcagccttttatttctttcttgtcctttttccaatctcatttttttatatttccattgtgttgacatcttatcattaactgtgcagatgcgtcatgcatttccagaagtatggaatattgagaacaagtatggaccataagacgtttattttaatcgacatgtatgtttcttagtttatacatatattaattctgtggtaaaaaaaccgaacaagaatatctttttttttttctatcatcaaaaagggtgaatatatgtagaggaaaaagatttgaatcaagatattagcctaaagcaataataatgttagtaatagctttaataacaaattcaaaacgtacattaatgaaccgagaggccggaaaatagttaaagtgaccactaagagaagcgaaggattcatgatgggttttcaacccagtagggcaaatttgttcaatgttctttacaaatcaagcttattaccttgtgggtgtttttgctagagatgaatgatagaattttccctagttggaagtcttttttggttactttatgggagctagtgatgtaatttgtttcgccttatggcatttcctaacatgtgcttttgtgatgtattgaagctttttttttgccttaatttatgctggattttaattttgttctttgtttcatttttcttgcttttgaaaaaaatatatagatatgtatatattaggattggtcgaggattttgagggaagggaaagacctaagaaaacttggatgagggtgattgatagtgatatgagtctatttgggatcgaagaaaatattcctttggataaggtgtagtggagggttgagggagcaaatttatgcagattagcttgacttaaagtttttctttttgattatttttcatttacttgtgttttgcaaacatttactcatgaatgatgtaaacttcttcaaccaaatctctggaaaaaaataatctacatggaaaaaacattattaatgttaacttgacagagatcccatccttgtgaagcagctagcaattaggcatctaacaattgacattttaatggacaggatagaatgtctcttgatagtcaataccctctgtttcattgtatcccatagctactaatctagtttgtatctttccaaagaaccattattttgaagtttcaccttgaacacccattttgaaccaatatgtttcttgcccttggggagaggggctaattgccatgttttgatgcggatgcaaagacacttgttctacctgagcctattgacttgatcatggatactctagggtttgaactcaagggaaagaatcaagtcttggcatgtgtggtgacatggcgtggggatggagtaaagaagagtcatagttctgttaggatatgttcttgcttgctacatagaatcgtagttctgttaggattgctatgatattatatctagtagatagattttatagttaattaggataaacatgtgatgatcatgttataataggcatgtgattagaggataggattagcttaattcttatcttgttgttagtttaattcttatcctagttttatgtttatcttagtcgaagttgtagccatataaagggcgttccattcattaataatacttagttttgctttgtgttttaaacatacttcttgattattgtttgcttgtgagctaactaatcaaaccattaaagacttttcaggagttttagtgctaaacatcttaatttcaggagtgattttaagagcgtttagtgatcttgaatcaagaaatatccttgttcttgttcgactaatatcagtggttttgttcgagttcttggagttaatctcttcaagattcttattcaacttgattgttgagcttattggtttagtaatcatatcaagtggtatcagttttccagggaggagaggatagataggattctctttgatcaacaaagatccaagggctatcaacaaggttcaaacattgctgcttgttcaagacttgatctttttctaccaagatgcattctttacgtcacaaggtagtaataacaagattaagagtggtttttacatccaagaatcaatctttcacgtccaagatttcatctttcacgtctaagattcattctttaagatcaagaaagttataacaagcatagaagaacacataaccatggagtccgagatggacaagcttgccaaagctatgcaagcacttgcaaagtcgcaaactgaatcacagagtcgactcaatgagaatactaccacaatcaatgggattggtagtaacatgaataggttggaggcacgcatggatgccattgcaaccatcatacaaaagaagcttgatcggaatagtgccaacttcataggtgccaattcagaggaagagttggcagaacgtgaagaaagatcatccaagactacatacaatgatgatcgtggcttaaagttggatgactataatggagatagcaatcgagaagacttgttacagtggattcgacaacttgagaaggtatgtgattatagaggctttgatgacaagaaaagattcaggattgcctccataagactcacgaaatatgctggaatttggcttgaaagcttcaaggcacaacgagccaagaaaggtaaagaaaagttgtgtagttggacaaagttgaaagttcaagcttaaagagaagttcttgcctagtgactatgaacaaaaatagttcataagactctctactataagccaagacacgcttagtgtacatgagtacaccatggaatttgacaagctagggcttatatttgacatagaggagaaagaacaatggaagattgcaagatacatcaaaggcttgaaccgccacattgccaagaaggtggaagtatccacttatcacacctttgaggatgtgacaaagttggctaagaagtttgaagaacatgagaaggaagagaagcctaagagttcttacacgcctaagtatgatactaatgctaaggccaaggctagcttcctactcaaagtggtatgaaggacctaagaggctaagaacctcaccccacctaaagaagacacaagagttgagaagcctaaagtcgtcgttccaaaggagaaatttgaagagatgagaaagtgcttcaagtgtcaaggaaggagacacatagcaagcaattgtcctaacaaaagagtcctcaccatgagacaatacctagctttgcaagaagaggaggatgtctattagttcgtccctgatgaagagcaaacttaggggaagaagaggaggaggatgcttttgctgaggatgatgcaaggctagtaggggtcaagaggcgcaccttacatgtcgaccatacacctagcatggagcaaatggaaaaatcttttccacactagatgcaaggtaggtgactatatatgtaatggtataatagatagtggttcttgcactaatgttattgtatctgaggtagtgtcaaagctaaacttagctacaagggcacaccctaagccatacaagttgagtttgctagatgatagcactggcatgagagtaaagaaacaagctttgatttcattctctataggggttataaggatgagttatggggtgatgtattgcctatgagtgcatgtcatctcttgcttggaagaccattgcagtttgataaaaaggtcatccatgagggggactctaatgtgtactctgtgttggttggttctaagagggtatgtttgcatcccttagctcctcattcagtggcgccaaagcaaccacctaagacaccaagttactttctatcttcaagggagttcgaacaagaggtggaggaagaaggttgtgcttatgccttgattgtaagacatgctgccacaagtgtcaagactactagcaatgagaagctcgaagccttgatgaaagagtttgaggatgtctttctagaggaactacgacccttgagaggcatagaacatgctgtagaccttgtacctggcgcccctttgcctaacaagcctgcttataagtgtgatccagtggcatctagggaattgcaacgccaaattgaggacctaattgaaaagggctatttaagggagatcatgagtccatgtgttgtgccagctttactagttcctaagaaagatgacacatggaggatgtgcatagatagtagagcagtgaacaacattacagtcaagtaaaggtttcctatgcctagattggaagatatgttggataagttacatggggcatcaatcttttctaagattgatcttcgaagtggctaccaccaaatgaggatcagagaaggtgatgagtggaaaacaacattcaagaccaagcagggattgtatgagtggatggtgatgccatttgccttatgcaatgcgccaagctctttcatgagcttgatgaatgaggtacttcgtccgttccttaacaagtttgtggttgtttacatagatgatatacatatctatagccaaaatgtggaggaacacttgttgaacttgcgtagcttattcatgaagcttagagagcaccaactctatggtaagattgatggcgacgaggttgacgggggattatggcggcagtgaatcaccctctttgccggtcactgaaatacaacctgaggtatctttaaattctgtaattggattgactaacccaaaaactatgaaattgctgggaaaaattgctggatgtgaagttgtggtgatgattgaccctggggcaacccataattttttatcactagctactgttgagaaattagctattcctgtgtcggaatcggaaggatttggggtttctctaggggatggacaggcggtgaggggtagtggaatttgtagaggggtgttattgagtttaaatggtggagttgaagtggaaacagattttcagcctctgggtcttggtaattcggacgtgattttgggtgtacagtggctggagacgttggggacagtggagagcaattggaaaacacaaacaatggggtttgaaatcgagggtgtcaagttcactttgaaggtgacccatcactggcgaggtctcgaatctcactcaaagccatgatacgtaccttatgtaaagagggtggaggtttgtggcttgagttgaaccagattgagcattatcaggagaaaacaccgcattcatcagccttacctgaaattccagttttcttacagagagtccttacccaatttcagtctgtgtttgctacaccagaaggcttaccaccgataagagaacatgaacatgcaatagttcttagagaagggtgtaatccggtaggggtaataccgtaccgttatccacagttccaaaaagatgagatagagcgcctcatcaaagaaatgttggcttccggaatcatcaatccttccacgagccctttctcgagcccggtgatattagtgaagaagaaagatgggtcgtggcggttttgtgtagactatcgggccctcaataaagaaacggtccccgataagtatcccattcccgtgattgatgaattgttggatgagcttcatggggcaacacttttttcaaaactcgacttaagggccgggtatcaccagatccgggttaaggccgaagacactctcaaaacagcttttcgcactcatgaggggcattacgagtttttagtaatgccatttgggttgacaaacgcgccggcaacgtttcaatcccttatgaacgaggtcttcaaaccattcttgcgcaagtttgtcttggtatttttcgacgatatattggtctacagtagttctgccaggaacatgaggagcatttgaccttggtgttgcacaccctagcagctcataaattgtttgtgaatcagaagaaatgtgattttggcaggtcggaagtagcatatatggggcatatcatctctggtcaaggggtggctgtggatatggagaaggttcaagcgatggtggaatggccccttcctaaaaacctccgggaattacggggatttttgggccttacagggtactaccgcaaattcgtacttcactatgctcatatagccaagcctttaactgatcaactcaagagagatgcgtttgggtggtctgaggcagcaactcaagcctttgaaaagctcaagaaggcgatgatcacatcccctgttttggcaatgccggacttccaagagttgtttgtggttgagaccgacgcatccgggtatggtctgggggcagtgttaatgcaaaacaaccgacccattgccttttacagtaagttgttaggtgcccgggctcaattaaagtcgatctacgaaatggagttgatggccatctgcatggcagttcagaattggagatattatctgctgggtcgacatttcctcattcgtacagaccaacagagtttacgtcatctcactcagcagcgagaagtaagtactgccttccaacgttggatgagtaaacttatggggttcgattttgaaatacagtttaagccggggtgtgccaaccgggtagctgatgcattatcccgcaagacagtgggagaggttgaattgggtgcgctgatattaactcatggggtggactggaccgacttggagcgtgaaattgaaggcgatcctctgttgtgcaaaattaaacaagacttccacgggggtgctattactcctgtgcacttttctttggtggacaacaagctgttgttcaagggtcgatacgtgattcccagctcttcggtttttattcctaccttgctgcgagaatatcacgattctcccattggagggcattcgggggacctcaaaacatatctcaggatggctgccgactggtattggaggggcatgcgcaaggatgtggcgcggtatgtgcaacattgtagcgtgtgtcaacaacaaaaaatgtctcaacagatgccagggggggtactacaaccactccccataccttcctcggtttgggatgacttgtcaatggacttcgtggaaggcttgccatcttccaagggggtaaacaccatcctcgtggtggtcgatcgtttgtctaagtacgcccacttcctcccactacgtcatccatttactgctgtgtcggtggcaaatgtgtttgtcaaagaggtggttcgtttgcatgggtttccttcctccattgtttcagatcgggatcgaatttttatgagtgtgttttggcgggaattatttcgtttacatgacaccacactcaaacgaagtaccgcgtatcatcctcaaacggatggtcagtccgaaatcgtcaatcgagctctggagacttatttgcgttgctttgtgggggaatacccgcgctcttgggctcagtggcttgggccgaattttcatataatacttctcctcatctctctaccaaaatgaccccgtcaaggtcctttatggtagagaccctcctactgtgatacgggttaatcggggagcctcacctgttgaaagcttggaaaacatgctccaagagcgagacgcagtattagatgccttgcagattaatctgattaaagctcaacagaaaatgaagagtagtgctgatgctacaagaagagaggtgcattttaaggtgggagatcgagtgtacttaaaattacagccttaccgtcagaaatctttggcttaacgcccttatgagaagttagccgcccgtttctacggaccatttactattttacagaagattgggcaagctgcatacaagttacaacttcctgtttctagcaaggtgcatccggtgtttcatgtctcccaactgaaacaggccgttggttccattcccgtttcagccactattccagagcaattgtcttctgacttggagttagaggtggaacctgatgaactcctcgatgttcgtagtgtttctagaggccagcacacttacttggaagctctcattcagtggcagggattaccatcattcgaagctacctgggaagatgtggctgctttccatcaccattttccatccttccaccttgaggacaaggtgaaactttgggggggtggtaatgtgatgcaccaaactaccactccactactcacctattagaggcgtaagaaaaagggggtaaatcaggaatagtttacaaattctgttgaaaggaatattttgtaattatgatgtcagaggttgttagcaaaaaggcagtagagtaacaataaaaaggggaagggaggagagaagaaggtattgagatttttgtaaggaacttggcccttgggagagttgggagcctctcgaaagctcaccattatcttgtgaatattttccttcctggttatatacaagaaccttcctctgtcaatttcttttctctctaatcttatttcttattctgttttctggttgccattgtttgaagttgcttgttgtgcttgagtaaatacgtgaagtggtgaaacccatctgaattcatcacatctattccaagtggtataatacaagcttgtaatccaaatctaatgagaaatctaagttatgaagaatttcaaaagaactaagtacccttgttttggatgcccaaggatttacttgccgctcaagttaatgctcaacgtgcaagatacaacctctttagtatcccaaggtagtttccataagaattaattgagctcaaatcaagaacaatatttttatgtattaatgtgaacacttcctgaattatattagatatatggtctgaaggttggaagaaagattagcttttaattttaagtttgagatagtttttagaatcgaggaaagattagctcttaacttgtaaactaaggattgctttataagtaaaacattagttatggaactcttaaaattggttttgaacatttctagttaaaaatcccatgtaattctcccaaactagcttaaaatctcacatttcacaagctaaggagagacaaatggcgttctcttgtgaaacaatctaaaattttcattaggctactgttttcaagtatttatatgttagaagtgccgcatataggtacataaaataagtttacaaacacaagtaggaataaggaaaactaaaagagaaacttcagccatacaaaaccggctgaaatcagctactactttctactttctagcttcaaaatctgattgcaagtctcctttaagccaatcaccaatgaaaacctttcctccacatgaagtgtgctcaaatcaagagaagaaacccatcattcgcctatagctacctgggtcagatgaagatacggcaaaaaaaacgctggaaatcagtgaaccaaaataagcaccaattggatgctttctgtccttgctacattttcttctcataggactacttcaagccatacatgaataagcagttagatccagctcctagcatccatttgatcgtacaaatgagctccaaaaagataagtaaaaccaagcagccaaaacctaattaatactaatgatgaattagttgaatagctaatgacgatgaagcaacactttagtaggaatagtgttaattatgatcaatgctacttaatcttctgattaatttttggaaaaatgtcatatctaccttctgtatacacttattcataactatatcgtattattattatttttaaataactaccttttaagtaccaaaacctaagaaatcaggcacttgatggattccatccaaagatccatttggcggggcccactaactgacttttgattttttgcctttcctcttttggttaatctcaatggttcatcaataacaactcaatcttctccccatttcatcaaatcatccctaaatcagaactttttcaaattcacccaaatgaggttatggaaacctctaccaagtttattcgaccacttttagtctagctcaaagttttacacttgcttcaaaaactaagatttattaactttagaaattaggtttttatttttattttttatttaactttgtaacaatcttaaataactcaggtgctttctagagtttggctttaattgtttttcccttggttatgtgaaagaagtatgactactttctccaagactaaagtagagagcaaaaaatgcaattctggaatttcttgcaaaagaaaaggaacgagttaatgataatgaaaaacaaagaaaatgatgagaagagaggagctgaatcaatcatgatcatgtattttaaagttttttttgctattgaagtgacttaagaagaggaaagaggatgagtgaagacaaacaaaagaaaggataaatagagggaaatcttgggcttagaaaggtgaaaaggtaagaagatgagttagtgggccccaacaaatgtatctttggatataatccgtcatgccactgtttggggcttgcttaagtccatacattacttcactaattttacaaaatttattttcttgaccaagaactgaaaaaaccttcagtggtgatctattaggttttggaagttaaaaggtagttatttaaatgtttttaatataaaaggtagttatttagatatttttaatataaaaggtagttatgtgaataaaagtgtatataaaatgtaattttttgacatttttgccttagtttttcttgctaattcaccttttcaacttgaccaagttgctatgaggagaaaacgagcaattattaagcaaatcgcaacactagcattaatccatggcccatgaaactctccataattagagattggattagcacttagtagaacttcttgctcctgctccaggtttccattacttctttatctaagtgcatcaaaaggttgttgggttatgaaaggtggtggttgtgtatagtcattgtcaaaatgttgttaatgcactctatttagaggatgagggattgaatagttttcacctcgtgacctttcattcctttttaaaaaaattgataatgtgtattggtcctatgactgtatgaatggtaataagctatctcatgagctgttactatcttcctcagagtctaggtagaagggtttgggctgataattttctactatgtgcaattagtttgttggatttggatatgctagttgatataggtcctttcccttgggccttctcttaatataggcctacagtgtgattgaagataaatcttctggagaatataagaacaatgagatggattggttagaggttgatttgttcttttggtgtaagactatttcgggttctctattggttatgttcagacgccagaatatgtgttggtgattgttttccatgaacatactttatccgcagagacatttttcttttttcttcctataagattatatttgtttcctctcttggtgctcatctcagtgtctctactttacgttaaactgttgacattacttgacaatgcgtatatttgtcgcatggtgctcttccctcactccacgtcgaccccatacatcaaaaaatgccattaaagaatattcgaactcacaaccttgtgttgaaagaatggaatccctaccaatgactcattaattcattttctctttaagaaataaatgatttcctcacaaacttttaggctttaagagcccaaaagataaaaacataaaataagatagacatcaacgtcaagattagccttaaatgcacaaagcacatgtcaaatgattgataactactcacgagttgcaactctttgggcgttgcctaatattaattggatctcttttaaaaattgttggtggttatggttggtggagaggaccatgtaacttttagctggtcacaactggtaatgattgtcacttttactgcccataaaaaaatttaaactgttgaatatgtttctggcagtggatctgacaaatcctttacaagttggcgtccattttgttttgccatgtgactcaattataatacgtgagttttattatccaccaggtttggctcactaatttccggattaattcaatctaaactgtctccaaagaaggaaaagggtggaggaggaaagccttcttctaatgaaaagacacgcatacgtggttcgttttctttccagggtggaatgcaggtattagcatgtagctttcattctgttaacatttgtggttcttccagacatacatccaatgctttttttttttcttgctataaccataaacattcttgtcatgaacattctttaatactgttgctgagcttagtgtattcgttcattcatgtaatttcctctcttgaggttaaaatggcatacagccttacaacctatatccataatgctccttagagtagaatccctaggttataacatagtaccacttatcaaaataaacatggcacacactgcaggacaagaagtaaatccacctagagaactgagcacctagtagtaaaagcagcgatacattactaataacagtagcagggccataagagtagtaaatgggcctcatttcaacactccccccgtaatggtgagagagaagaagcagtctgaactcccagcttggagagcaaaatagagtgttgctgaacagggagaaccttagtgaaaacatctggcacttgatcttgagatggaacataggtaggctgaataaccccttcttcatttgtattgtccctcaggaaatgacaatctatgtctacatgcttggttttctcatgatgaactagatatgctgctatggcaagagcagcttggttatcacagtagataggagtagcactggactttttaatgcgaagatctttgaggagttgtttgatccacatcacctcacacacagcaagagccatggatctgtactctgcactgaccacaagaaattgcctctttgactttcaagatacggggggagtcaccaaggagcacacaaaaccagatgtagaatttacaacacccatcccattcactatcacaaaatgctgttagttgagcactagacttgttcgccatgagaattcaccctgttggcagcttgaagatgcacattagtggggcagtgcataaatttgcttaaatcatgtatagtgaaggcaatatcaggcattgccttgtaatagtgagataaatgagcttccccatcaatttttgatacacatcaggttgttgaagaggatcaccattgtcagcatagagcttgacatgtgagtccatacgaagcctcaatcgtctgcaatttataaaaccatattcatcaacaagacccatcacatacttctttagagataaaaacgatacttcactacactgatccacttcaatcctcaaaaaatatcttaggccacccatatctttcatgtgaaattggccagcgaagaaactctttgcttcctcaatagttgctaaactattgccagcaagaatgaggtcgtccacatacaccaatatagcactgaaacagtgagagttttgcttgaagaatagagagtagtcacacttggattaagtgaatacattttgctttaaagcagtgttagcttggcaaaccattgcctcaaagcctacttcaagccataaagtgacttaagcagcttgcacaccttagttcatttggtgtcacttctgccatcagtacttagctccccctctccttgaactttgatcctgttacatgtttcactatatcctggtgatagcttcatgtatacactatcctacaattcaccatgcaaaaaagcatttttaacatccatttgtttgcaagaaccaaccctctaaggatgcaacaacaagcatgtggtcatctttgctacaggggtaaaagtctgctcataatctattccatatctctgtctgtcacccatgattacaagccttggcttatgcctattatttgtgccatcagtgctgtattttgttctgatccatccatgtgagggatggctcatttctacaaaatcctagttccgttaggatttgtgttgttttcctaattctagtaggaataggactcctaaaatcctaatcctcctagttctgttaggagtttaaaagttttagtttgattgtaattctagttgtgttagaaatccaaatcctagattcatgtcacgtatggttagaacatggctagtaggataatttgtcttgtgatgtccatagccttggcatttgtggcacctaactttcaatagcttgtcttctgtctccttttctttctccttctttgaggaatcaacgtttttagagctatctaaaccactagcatcaatattaggtttaaaagtgctaaaagatttcgaatagttcttacttgcatacaatttctttttctagtttatgtagcgtcaccagggaacaaaaactcggccgttccgttctggaacggccgctttgtaacggatttcagagaggccgttccgttaaataccgttctagaacggtgatttggaattcacaccaaactcggcgcgatagcgttacgtaacggtgtaacggcgttccagaaccgttacaatcacataacgtccgttatttgaagaagaccagttcttttggtggaggaagaagaagagccaacgcaagatctatagatctgagttaaaatttgaaaataaaacatgtttttttatttaaattaaagcttacagaggatgtagaactcaaattcgagtaaacccctcctttaatttcattaggttactgcaaatcgaaccctaaattgcaaaccctaatttcgaaaaaaccctaatatgcattgggatgcaacgctgcttctccggtcatggcagagaaggtcgacgagtcatcttcggctgcttttagcactgtagctgccggtggttggcttgtttgcaggttagtgcttgctggttttctttctctcataccgatcatcttcttcttttctctcttctctttttcttttttattgtgtgactgccagtcacgtgataattgcaactcataaagtatctctttctctctcttcttttcatccctttttatttttctttcccttttagtttttattccctcacgtggaatcacctaattttcatccttttttatttttttagttacactcttacacagaagtatgttcaaatatcattatagtacctcaaatattgtatttataagagttttggacataatatgatatagaaagtaaaatagaagaaaaataaagtttaaatgtcacttgtgtgatttttttaaaaaaattcacgccgcgacggccgcgaaacgttctatttcccgttacaagccgttcccgcgataacgcgaccgttcccgcgaacgcgaccgcgaccgcgttttttttccttgagcgtcacatcttgcaagcttcttcaaaggtgagttatgtgtacaactccaatttctctccaatcccctccgtcctcatttaggcctccaaggaagctacttaaacattgatcttcaagttcatcaattttccaaagaatggataacttctcgaactcctttatgtaatcttcaacggacatattcccttgtttaagagtagaccattccatgtacaagctttgtttgtagttagaaggaacaaaacgtcctcttaacaactttttaagcttatcccaagtagagattttgggtttattagctttcacacgctgcctctttactccatccaaccaaatagatgcatatttggttaccttaagcacggccaccttgtatttcttttcttttggtgtctcttaatcccaagtagagcttttgcgtgtgaaagctaataaacacaaaatctctacttgggataatcttcttcttgtttccgaaacaactaattcttatggtagttaggaaagcaagaatggtttctaattcaatagggaatatattaattattattagtttaagttaaatagtgcacgaatctaaatagattattcgtctcaaaatctcacttaagtatagatttgtttggacatctgagggaagaagaagagagcgagataaaggagaattatcactcaatgaatccatatcccgagttttcccatttacttctttgaaagcaatatagttcacgaggtcttattatcagtctatggacataagagtaataatttaagggcaaaaactatgactttatgggtttaaactgatacatgttctgttaaactgatagatgttctgtgttaaaccgatactcatatattcctggttaaactgatagatatatgatttaaattgatacccgtctcagtcatgtcttggattgagacggtctgacacaagactttttgtgtattatatatctgattagaataaatttatcctgtttactaattattttatcttctccagacacttgttgacacaatatgcaatcagtttggtaaagatgaactcaaactacagtgcaaggtcctttcattgtcctacagtcataaggggatcccttcttcagaaaattgggtcgtgtcttctgtgtcaaaaaattccattgaagatcaacaatatgatgctgtcatcgttaccgtgagttttactttgcttactgctattgcaccaatctttcttcttttgacacactgataatggcaatgctgttgtggtttgaagccatgttatggggttttagggatatttatggagtctgatctaatatgttattggataaaattcagatctgtaacgtgactcaatgagattgaaaaaaattgaatcaagataatggattggaaaattaggagctaacctagggtctataagcgatccacttggagtctcataccaagcaggtattcgacattttaggtttatattgctgctatggctcatatgggagcctacatagggtctggtgcttattcctttttcttttgtctagttttggggctgcacatttctgttgtgttttgatatggatagccatcacctgcaattgcatggaggctgaactaagttctataggggagcaaacagtatctgttggaaatttattttcatattgtgtttttaaatgctataatccaaaatttgttgttcccctaaaatgcctaaaatacccttatgtaactgctccatctgtcccttaatagacttcccatttctccaatgcatgtttgccaatacacattttgtattgttaatatcaaaaattacatattagtaaaaattataaaagtttgattttcctaatgtacgcaatgagacgaatcaaacaagacgccatatgactatgttttttcttatacttcctatgttttttaataagtgacatgttttccttttagggaaatgtcacaataagtgacacatagctcaaagtagtaaaaatacttctcatttattacatctttgccattatttaattgtttcacctacctactttatccaatactcaaatttgattggttgaacaattggtcccaactttctctagactccttggtattccctttcccccactttctctctgtgtcacttattaaaaaatggaggacgtatattggaaaaaaattggaaggttttcttcacttatgaatagtggtaaaattagagatgggaaggctattttgggatggatggagtaatatttaaatttttaaaataatgtcattgttttagtgatgaaataaaattcaaggctattttttctagtaattatgttatctgtacatcaccacacgtatcgcgtgcatataagactagtttgatgatattccaacactgttcgaaggaagtcaggcatggaaccatgtttgcttccatatgggaaatattttgcttactctccttcaaacatctacctcattatcccagaatgattgatcgaatctaatacaaatatacaattgatcatatgccaccagggaattacatcaaattaaatttttatagaaggggaatcagtcatagcctcatagggaacgaataagtgatactcgccagtttctttcctggttacttttcctcttctcactagccatcctttatgtatgggtatgctgcatcattcctgccactggttgggactcccgtttgaactatggggggatgggaaagctaagccatcatcttcaaattgagtttcttgagaatgtaagacaccatctgtaagatgaatatagtgcactctatagtcaatgtcatgatctttatgggtttatctgctgaaataactgtgatatacccagctctccatttacaaagttttcctacatattaaactcttgcccgcaattctagaacttcattgtagaacttttcctacataagcatcatttgtcttttctgtagtaaaagttagaaagagctttattttagaacattcgtttttagttttctttgttgttgattactccgccacttttaatacttttatgattcaagtatttgacaaaatcatgtaatttaggtcctctgctgcatgcagtctataccctctctctctctctctctctctctctctctgtggttgtgtcttacttgttgagttactaactccagccattacataaagtaggctggcattatgatgagcaaattactcaagaccacatgttagctcctttttcttttctccttattctgaaaggcaaatataggtccatcttggtgcttctcatgtcataagtaagctgaccccctccttttccagggaataggacaataatccaaaagtgagggttttacatgttgggatttgtgaagtttcttattttacttaatagccgagtcagtgttacaatacatagtaccgtgttacaaaatagtatgtaacaccaagcatgtttatgtgcaaaattgtgcaagactttgttgctggcacgccaagggctgttttaatgtagtttacttattcttttaggtttttcagatgacaatcataaagggaattaggagtgtttttattgtagtcaatccctattgtgctacaacgataaaagaaaaaagcacaagactagaaggagaagtaatgtctaggaaagactcctcacctggggttgctagtcacctacacatcttagaaggcatcaaaccaaagcttattcccctcgactgttttcgggagaaaagaagacaaaattgtttctaacttatactttaccagtttcactacagcatcagaaagaagcaaaatatgctcccacaacacggcgaacctagctttccagatgtgataaaccagaccagcaaaatgattattttcactagagctttgagtctattttttcggtttttccccttcttcctggtaatgtcacgccaccaagccatcatctcaattttttgagatttgacgtaatcgctcaaatagctgagtaagacacttcttgctctaaatactaataaaaaagaggtgaatgtgggtctcagccatgttactcaaatcggataaagtgtctactcttattagggtttttgggtgttggactcatccatttttttttgtaaaatgtcaagattttggtttgaaatgagagattcaagtgtcgtgacatgagtcggcacgcaacacttaaacgtgtcgaagtaacagagggtctcagacaatcaactttaatcaatcacgaaccccaaaatttatgcaacctttgctcatattcagtctctgtaaagcactcaactgcagcacacccacccattcgcttcacctacagcaggagggcacccaagtaattgctatgatgagcgaattattctgttttgccttgctggaatattgctgttagatttgctgactcactggcagttaattatagtcagagaatgagaaatatcctgtagagagagaaagggtatcttttgtatttagctctataaatagctaaggaagggaagggcattgagagtttatgatattataataggagagatttagcctctcgaatgctgataggagcgtagctcttgttggattatcaatactactctgtttgctctatctatttctactcaggttccttcttgtacagtggatccctgattggatttacttcatcaaccagcagataaaattatttgtaggcacattgaaaccattccaaacctaatgaggccaaagtttatcacaaagaatataggagccaaatgtaggcaacagataagagtataattgccagaagttgaagactccaggtattgttcagaaaccttaatgcatatcatcattctgacactagattttccccggagccaactaacaaaaatgaattaaagagattaaggctatgtttagttcacctgaaattttctgatctgaacttatctgatctgatctgaacttattttttctgatctgatctgatctgatctgaaccaatctgattacaagatcttatcttttagatttttctcaatatataagaaaaaatatagtcatgtggggtcttgtttgattcgtctcaatgagtactttattaatattcaattattataatttttactaatatgtaatgaaagatataatgatttttaaatataagcatgatctgaactgatctgatgtgaacttattttttctgatctgatctgatctgattagatctgaaataagcaaaaataaggtgaactgaacatagcctaagcaacaattgagggaaaataagatcattatggctaagataagataaatatgtaatgataaaatcagagtaattatatcagttacactctcaacattcgtcagattgaggtttcctcccaaaatgccaacccacttttctgtattttcacgtccttctctctacccttctaggtatatattacatcagctgtaaaatttttgaaccaactagtagaatactgatctaccctcaactgcctcactttctcattttttctgggcctttttctctctagcacaagtccacataagtgatgcatagcagaaatataattccactagtcatcctcaatattgatataacaaacacatcacccacatattatcatttttaatcgctgcatgcgaggcatacttacccaccaatcaggatatgcataacagcgttcctaattccaaaaccaccatatatcttgggtttgcaactctcatccctagcaacaaggggactttctgaaaaagtggcagattccgcccacaagtagtttgtacggacacctttattatattattaatatcatatttcggcaacacaaattaccagcccagtaaaacatgaattgacatgagactaacaaggggcccaatctaatatcgtacgtctgtactaagcaatgtataaaaaaaagctcaaggtgcattgatgcaatagggatcctaatgtgcataggtgcgcctcattgaagtgaggcaccactaaggataaataaaaaagattgatgtaaaattaaattgtgcaccttgggtgcgcctcgatgaactttttttgtgtgcctaagtgtacctcaagtacgcctcattgatatcgcctcgcctggcagaaaacgagcttgaccccaatcgccttgctccccaccgcctaggcgtgcctcagtcacactttttaaatacattggtattaagtactcagaatggcaaaaagaaactttgggcattaattagacatttcactttttgtgcaactatttgtgacttcagagattgatatgttttctacattacagacttttgtgatggctgcatggtctccactgtcaaagaacattagtttaagtagaagaaatattgctctattaccttcctccctctacaaacaaaatcctaaaatgtggttatgtagtgccaattcaaacttgtagatgcatgactaatgctttcattatgctgtgggtttttatactatgattcatgtccaattacataacaattagctggagtcaggatatgtcacggaaattttaagcctggcaggatgattgtttatattttctctttttcggtgtttaagtcaaagtaaacttctaggctgctcttttataggctagttgggctgttggggagatctacacattaagtgtgaagaaatcttgtctaactccagtttggttgagaactgtaagctgtcataacatttgttgcatgatgaggccttgtgggattatcatgttagctgtaaactctaaacttacttgaaatctagtgttgtgtctccttatttctgtagtcaaaattgaaccttctgtacgtttttgatacctgcgactagaatgatggaattctgaattactgatactattacaaccatctgctaagaacgaagatgactcttagctaatttctcagcagatttagagaaattaagaagaattactaatgaatatttaaagagaaaactaccaagatatgattgtattgatgaaaaacaccaattacaacctaaccaacattcgagaggttggagctctcccaagtaaccatttctctcactaaacttatcaattttcaagatgccttttccattctcagttcctctatatttatactactccccttagcaaactacccaacttattccccaagtaaactaaagagataatatctaaaatacccttccccctacaataatattagttcttagcattaccggccccctaaacttccaccttgtcctcaaggtgggtcgtaatcatcactaaattctgggcctctactcgtatattcagtgtcttgcagcccttcaggccccaagcctaggttatgcagctcgtgttgcggctcctcctcatatagttctctggctggagtgagtgcctcaactataatgaaaaagtcctggaggtggggaaggaaggagtgtctgaaatggtgtggtgtgctgctggtgttatgggcttgtgcctgaaagttttgggtttaaagagatggagtggagaagagtggagaagtgactggagacgtaaaagaaggaatcataatttttgtaagtggtgggttgaaaaagttggtgggaagaattgtttttataaaatgtagtgtaatggtcgaaaaatgggtggagtaagtatggtttttggctggggatgtggtactgggttgaaaataaataggtctgagcttacttgtaaaattggcctcaacatgagcaggcccaatatcttgagccaattccccaaaagctggcaatagagcactcttaattgcattgttgtgggccatcgggctccaaacatatattcggaggagccggacttctttggtgatgtcattagcttggcccattgcacactttcccttaacagcctcaagatcttttcccacttttgtaccccaaccacgtggcttcaccatcctttctttcttgcttttgtcacttttttggcaatatacgagtttgtccttactaccctcatcttctaatgttggcttcctcaccaagcttaatttctggaattttgtccaccaaatcccaccacccatcgtcaacaccatacctatctacaccggccaagaagcctggtcctccacccgaattttcgccacagacaaagcctgaacaaccgtcagttctctcaccggagaagttcacaggtccaccacctgacccactagttgctgatccacccttcacaaatctccctcctctggctgccacaagtagtggttcctccgtaatactcatatttctcgtccaagagccctggaccaccaccggacccacttccaccggcaccaacttgttcaaatgatacttctctttcttttccaaacagcctacttggactggaaaaaccactgcgattgtagcctccgccagatctgtagcctagtgcacctaacgtgcttccaactgcaacccaatagggatggaaatggatgggattcggggagggtggagcatcacccgcatccgtcacccgcatccattcgctccacccgctccacccgcatccatccatccgtcacccacgggtgaaacgggtgggtcggtgataaacgggtggaaccatttagggggtgtttggtatcatgtttttttacaaaagaaacagaatcaagtaacaaaatccgtttctacttgtttggttctatgttgctcagactcgagtacccatgtccgacacgggtacgtgtccaagtgtccaactcagctattttctagaattttttatattttttaacccaaaacaaagtgtccaagtgtcccacccatgtccgactcccgaggatccgacacgggtacttgaggtgaaatgaagagtccgagcaacggaggtttggttagtgtgtaaagtaacaattaccgttacttgaggaaaacacatccccccaagttgtttccattcaaaaacctaaggaaacaaataacgtttcactcctcaaacaagaggaaagggaatgggttatatttatttccattccattaggataccaaacaactaataagggtaacacttattattatcctttcccctccttatcaaaatcctttccattccgtttacggtattcataccaaacacccccttagtatattttctaatgaaatttgtgatatgatatgcatgatataaaataattctatcaaaaatataaaaagtaagtaaacttacatgtacaacttaatagatgggtgatgggttggaggttaaacgagtgatggatcgggtgacgggtgaagaaattctcacccaccactcgctttccatccatttaaattaggtttttcatccatttaaaaaaccgggttaaacaggtgatgtatgatccatcacccatttccatcctcaaacacatcccgatttgtttactgcaccaccagatccaccagtataaccacccgaaaaatcatcatgccttctactagccttgtaacctgctcccggtgagaagcttcttccacaagtggtggtcgctggacctccatctccttcttccccaaaaaattttccatgacacccactcgacccttcatctgtgacaacctcttcttcgtccacctctgaagttttggggtcgtcttcctcctcaagctcctcttgaagtaactttaacttccgttggatgggagagaacgcttcattgattatcttcaccagatcttcttgaagtttctcgaaactttttctcacgttttcctctacctctttcgtgatttcctttccgatctccttcatttttagactaggagctcttgcgattccatggcagatttctttttttaaaacaagaaaatcaggcacttaatctcccagaatagtggtgctctgataccattttctaagaaccaagatgactcttagctaatttctcagcataacaacaaatttagagaaattaagaagaattactaatgaatatttaaagagaaaactactaagatatgattgtattgatgaaaaacaccgattacaacctaaccaagaggttggagctctcccaagtaaccatttctctcactaaacttatcaattttcaagatgccgtttactactccccttagcaaactacccaacttattccccaataaactaaagagataatatctaaaatacccttccccctacaatattagttcttagcaccatcaaactgggatggatggttttgtaaggttccaatttacttctccatcaaaatattttaggattttttatctcatgtattttagagtttcctcgtccctttttatctgataagattcttctgatgatttgattttatggtaggctccaatcagcaatattaaagaactgaagattctgaaagctggagttccattttcacttgacttcattccagaggtttgtatttttatagtggttagacatgcttcccctagttttcaaagtaaaagcatccttgttgtgacgatattttttcccttgtttttgtttttattattatcatcacttatttccattttctattttccatgctgataagatgttcatcaccataatcttgtggtatcagaagtgtttagtggagtttattcactacacatgcagttgttcttttgccatgaccgccattcattttctcgtcaaaacaaatctatgaagtttggttttcagactcatggttcttgtagctcttgtgaatttttttttcttctccttgcatgcattcttcaaattacatattgcatataccaggtgctctcctttattttatatttaatttttaaaattctatcatatattttttaatgtcaaacctcaaactaggggttcactgcatcttaggcttaccaggctaatatttctttacttaaccttttccctttatatttgctatcctcttgtgtagtaatcaccataagaagggtacaaactaaattaccctcccattcttttgtatcattctgaaatagtgtcacagagctttgatttttttgccctcatttaatctggcaaatgttctctctatttttttttttttactttcttttgacgggattctcaggcaattgttacggggagcagccagtcacactgtttctgtttattatgcaggtgagttacctgcccctctctgttatgattactgcgtttaagaagaccagcgttacaagacctcttgagggcttcggagttcttatcccttcgaatgagcaacataatggactgaagactctcggtaattgtctggttcacgtgtgtagcgaatcagattttcaaaccctgatttcgtaacattgcaggtactctgttttcatctatgatgtttccagatcgtgcattgtcagacatgtatctctatactaccgttgttggaggaagcagaaatagagaacttgcaaaagcttcaacgtatgagatatgcaatgttttaaatgtatgctatagtcatcgtttcaaccttttggtgcctttttcttactaatttatcctcctggtttaatgatcttagggatgaattggagcaaatagtttcgtctgatctccaccagctgttgggcactgagggaaaacctacttttgtgaagtattgatatctttcacccaacttaacatgatttgtgcttataatatgttaaataaagtaactgaaatcctgaaattaagactacgaaactgtatggtgacagtcatttttactggaacaatgcattccctttatatgggcacaattacgactcagttctgagagcaatagaaaagatggaaagagatcttcctggacttttttacgcaggtaatctgtcatttgcttgttgcgataaagttcatgtacagttggcatatcaatcaacttgcattctttcttgctaactccaaacaatcaggatcattaacttgtaggctgcagcaacagagagtatctcccaagttgttaggtttcatgtaacctcgtcgctgagatgaaatttccgttggctaaaaagtgaaagttttgtattgatgttacccaaaacaaaagtattttgcatgttgcttgaagttttggttgtttcagatagtacatcctttgacatgaaaataaatggaaaagcgtatgtcaagcaattatcatctagtttctttgtttctagatactagccgcatttgatcccagatcatttttgaggaagtcagctgaaataccgtagctatccttcagttttcataataaaactttaatggatctgatgtacagtaatttagtgtgcaccgggttaataattgatattaacttcatatagtgagtcttataaagatataatgaacttatatacaatatagtggattttattaatggaaaacatatagtgaaactatatgcaatatagtatgatacataaagacttagacaacaagagcattcgaaattacaaagaacaaaggaaagaacaattgtatcaaaccggttcgaatgaacaaacaaccaccacttccacaatcaatgtaccaccaatcaagactaaactataacaatgagcttctagtttaagtctactttgagttttaatcaccaattcaacgattagatgatcaaaattgcaaaggttaagagttggtcaaacctaaccaagagttacactaggcacatagctttgttaggagtatattagtttatgaattctagttaagttagaaatccaatacctagttggattaggattcctaattggattagaattatagtttagttagaattctagtaatagtaggcgtgtgattaggagatataattagcttaattcttatattgttagtttaattcttatcctcgttttaggtttatctttagtcgaacttgtaccctatataaggggcctttatttcattaataatatagtttattttgagtttaaacctttacttgtgattgtttgcttgagaggttattaatcgaaccattaataacttttcaggattgttaagtttttagtgttaaacatcttaatttcaggagtgattttaagagtgtttagattcttgtattcaagtttcaggactgatcttgaatcaagaaatatccctagtttcgactaatatcataagtagttcgaattcttggagtcttttcttcaagattcatattcataacttgattatttagacttcttggttttgtaatcatatcaagtggtatcagttttccagggaggagaggatacaaagggttctctttgatcaaagaagatccaagggcatcaataagaatgacacttgcaataagttcgagtgatacaaacaacttcaagactcgatcttttgctaccaagaaccaatcttgacgcctgaagattgttaggacaaaggataagaagtgtttctacatccaagattgcattctttacgtccaagattgcgtcaagatccattctttaagttcaagaaaggagtagaaagcattcgaacactacttaaacatgacatccgagatggataagctggctatggccatgagtgccttggcacaatcacaaactgagtcacgcaaccacatgggtaggatggaggcacgtgaccgtggattgaaactagatgactatagtggagatggcaatccagaagacttgttggagtggatttgccaactaggcaaagtgagtgattataggggctttgatcacaagaagagattcaaggttgcttccattaggctcacgaagtatgctggaatacggctcgaaggattgcatgcacaaacttcttgcctaatgactatgaacaaaaacagttcataaggctcgcatcaataagccaaaacacacttagtgtacacgaatacagcatggagtttgacaaattagggcttatatgtgacatagaagagaaagagcaatacaagattgcaatgtacattaaagggttgaatcgatatatagccaagaagatcgaagtctcaacttatcacttctttgaggatgtgactaaattggctaagaaattcgaagagcatgacaaagaagaagggcctaagagttcttacacacctaagtatgactctagtgctaaagggaaatcaacagttccctactcaaggtggtcggaaagacctaagaaccccactacacctaaggaggacactagcatggagaagacaaaagtggccgtacctaaggagagtttaattttgtgttttatacatctttgcttaagagcttaacaattgaaactattaataacttttcaggatggttaagtttttagtgttaaacatcttaatttcaggagtgattttaagagtatttagattcttgtattcaagtttcaggagtgatcttgaatcaagaaatatccccttgttcaactattataattgatcttattcgagttcttggagttaatttcttcaagattcatattcatacttgattattagacttcttggtttagtaatcatatcaatatcattagcattaatttacccccagggagattaagaaaggattagcctaatcaaggcgcttaagaagtttttaggaaaaatcgtgcttgttaagcttaagaattgaacttctttcaccatttgcccttgattctcttgttgaactagaagatcttggttcatagtagatgctcctgcatcatagtagagcatttaattttaattttttaacatgcacgaagatgtaggtagtgtagtatatatcgtgagacgtggtttaacatatagaaagatgtagtttctgcatgatatagtgagtttttgcatgatatagtgaatgtctgaatgatacagtggatcgttccgaattgttgtagtttgtatgatatagtatttttgtgaatgatatagtgagtttcttcatgatacaatgggtttctgaatgatatagtggattgcttagaaatgatatagtgagcttttgtatcatgtagtaggtttctatgtgatataggttgttaaaagatgatacatgcttttggcctcatgtactctaatgttaacgtgaacccggtccttgcaagtcaattgcagttttttcaatattaagctatttttttttttttttttttttttttttttttttttttgtacgggaatatttagcatctttaccacaaacataaccatacgaatattatgcggaaattccagtctgaagtcttaacttttcaaaattaaaagcttctatattatttttggaatgaaaaaaaatgagctatggcatgttattttgaaatacaatgagtctcaaggtgcatagtggcttcaattctacgaataatgaatggactactgatttctaattttttgttccgggcttttgcattaggtaaccataaagatggactctctgtgggaagaactatttcctctggatacaaagctgcggagcttgtgatatcctatctcaactctacttaagatgcctaaatgatcgaggagactccgtaagtcctttctctgattctatctttgaactgagtggaaacacgactgtggtctaaagtagttgatgtctcagatatccagaaatggcgttagtgatattcaggagctgtccattgaccctttgattcattgttgcagtttactgaaagttgttagctggtctcagaaaaacgaaaggaaaaaagggggaaaacaaaaacaaagaaacgtagattgtggtgttaaaatcaagaattccagagatttgtaccttctttatcagttgaattgtttacagtgtgaatcaagaagttagctcgaccttcttttcttgtgaatggtaagatttcgtgatcatcaatacttgattgtgctgtttgcaacttcaacggtaagatttcctgatcttacagtttaattgcttgtgctgtttgccactt

SEQ ID NO: 108 - DNA, 1575 bp, synthetic construct
  source 1..1575: mol_type = other DNA
atggtaatgctatacgattctcacctctcaggagtctcaactcatcttcaactatcgcaggcatttcccaggaagaacccattaatggccaaagtgtctgagccgggtaaacccacttctgctaaaaggattgctgttgttggtgctggtgttagtggacttgctgccgcatataagctaaagtcccatggcttgagtgtgacattgtttgaagctgatactagagctggaggaaaactcaaaactgttgcaaaggatggtttgatttgggatgagggggcaaatactatgatagagagtgaagcggaggtcacgagtttactcgatgatcttgggcttcgtgagaagcagcagtttccaattgcacaaaacaaaagatacattgcgagagacggtcgtcctgtgctgataccttcgagtcccattgcacttctcaagagcaatatcctttcagcgcaatctaagctacaacttatgttggagccattcctttggagaaaacgctatgcttctaagatttctgatgagcatgctcaggaaagtgtgggtgagttttttgagcgacattttgggaaagagtttgttgattatctaattgatccttttgtcgcgggtacaagtggaggagatcctcagtctctttctatgcgtcatgcatttccagaagtatggaatattgagaacaagtttggctcactaatttccggattaattcaatctaaactgtctccaaagaaggaaaagggtggaggaggaaagccttcttctaatgaaaagacacgcatacgtggttcgttttctttccagggtggaatgcagacacttgttgacacaatatgcaatcagtttggtaaagatgaactcaaactacagtgcaaggtcctttcattgtcctacagtcataaggggatcccttcttcagaaaattgggtcgtgtcttctgtgtcaaaaaattccattgaagatcaacaatatgatgctgtcatcgttaccgctccaatcagcaatattaaagaactgaagattctgaaagctggagttccattttcacttgacttcattccagaggtgagttacctgcccctctctgttatgattactgcgtttaagaagaccagcgttacaagacctcttgagggcttcggagttcttatcccttcgaatgagcaacataatggactgaagactctcggtactctgttttcatctatgatgtttccagatcgtgcattgtctgacatgtatctctatactaccgttgttggaggaagcagaaatagagaacttgcaaaagcttcaacggatgaattggagcaaatagtttcgtctgatctccaccagctgttgggcactgagggaaaacctacttttgtgaatcatttttactggaacaatgcattccctttatatgggcacaattacgactcagttctgagagcaatagaaaagatggaaagagatcttcctggacttttttacgcaggtaaccataaagatggactctctgtgggaagaactatttcctctggatacaaagctgcggagcttgtgatatcctatctcaactctacttaa

SEQ ID NO: 109 - DNA, 45 bp, synthetic construct
  source 1..45: mol_type = other DNA
gaaggtgaccaagttcatgctcatagccaatcgcgcagaacaaat

SEQ ID NO: 110 - DNA, 49 bp, synthetic construct; identical to SEQ ID NO: 84
  source 1..49: mol_type = other DNA

SEQ ID NO: 111 - DNA, 25 bp, synthetic construct
  source 1..25: mol_type = other DNA
catgtttccaggctccagagttgaa

SEQ ID NO: 112 - DNA, 45 bp, synthetic construct
  source 1..45: mol_type = other DNA
gaaggtgaccaagttcatgctacagaaagagactgaggatctcca

SEQ ID NO: 113 - DNA, 45 bp, synthetic construct
  source 1..45: mol_type = other DNA
gaaggtcggagtcaacggattacagaaagagactgaggatctcct

SEQ ID NO: 114 - DNA, 29 bp, synthetic construct
  source 1..29: mol_type = other DNA
ttatctaattgatccttttgtcgcgggta

SEQ ID NO: 115 - DNA, 30 bp, synthetic construct
  source 1..30: mol_type = other DNA
ggtaatggtttaccatagtatttctgcttt

SEQ ID NO: 116 - DNA, 42 bp, synthetic construct
  source 1..42: mol_type = other DNA
gaaggtgaccaagttcatgcttgtcgcgggtacaagtggaga

SEQ ID NO: 117 - DNA, 41 bp, synthetic construct
  source 1..41: mol_type = other DNA
gaaggtcggagtcaacggattgtcgcgggtacaagtggagg

SEQ ID NO: 118 - DNA, 30 bp, synthetic construct
  source 1..30: mol_type = other DNA
gtcaaaatgaacaattgggaacttcaaatt

SEQ ID NO: 119 - DNA, 45 bp, synthetic construct
  source 1..45: mol_type = other DNA
gaaggtgaccaagttcatgctacagaaagggattgaggatctcca

SEQ ID NO: 120 - DNA, 42 bp, synthetic construct
  source 1..42: mol_type = other DNA
gaaggtgaccaagttcatgctcgtggcgggtacaagtggaga

SEQ ID NO: 121 - DNA, 31 bp, synthetic construct
  source 1..31: mol_type = other DNA
gtgtgggtgagttttttgagcgacattttgg

SEQ ID NO: 122 - DNA, 30 bp, synthetic construct
  source 1..30: mol_type = other DNA
ggagcataatagcataatgccactcttagc